(19) United States
(12) Patent Application Publication
(10) Pub. No.: US 2025/0122491 A1
(43) Pub. Date: Apr. 17, 2025

(54) OPTIMIZED PROTEIN FUSIONS AND LINKERS

(71) Applicant: Integrated DNA Technologies, Inc., Coralville, IA (US)

(72) Inventors: Michael Allen Collingwood, North Liberty, IA (US); Steve Ehren Glenn, Iowa City, IA (US); Christopher Anthony Vakulskas, North Liberty, IA (US)

(73) Assignee: Integrated DNA Technologies, Inc., Coralville, IA (US)

(21) Appl. No.: 18/908,672

(22) Filed: Oct. 7, 2024

Related U.S. Application Data
(63) Continuation of application No. 17/235,921, filed on Apr. 20, 2021, now Pat. No. 12,152,258.
(60) Provisional application No. 63/012,658, filed on Apr. 20, 2020.

(51) Int. Cl. C12N 9/22; C07K 14/47

(52) U.S. Cl. CPC C12N 9/22; C07K 14/47; C07K 2317/24

(57) ABSTRACT

This invention pertains to optimized protein fusion linkers for creating multi-functional chimeric proteins and methods of using the same. Additionally, the invention pertains to chimeric proteins for use in guided endonuclease systems and methods of using the same.

### CROSS-REFERENCE TO RELATED APPLICATIONS

[0001] This application is a continuation of U.S. Non-provisional patent application Ser. No. 17/235,921, filed Apr. 20, 2021 and titled “OPTIMIZED PROTEIN FUSIONS AND LINKERS,” which claims benefit of priority under 35 U.S.C. 119 to U.S. Provisional Patent Application Ser. No. 63/012,658, filed Apr. 20, 2020 and titled “OPTIMIZED PROTEIN FUSIONS AND LINKERS,” the contents of both applications which are herein incorporated by reference in their entirety.

### FIELD OF THE INVENTION

[0002] This invention pertains to the chimeric proteins and methods for their use in living cells.

### SEQUENCE LISTING

[0003] The instant application contains a Sequence Listing that has been submitted in XML format via Patent Center and is hereby incorporated by reference in its entirety. The XML copy, created on Oct. 7, 2024, is named IDT01-019-US-CON.XXML, and is 1,770,620 bytes in size.

### FIELD OF THE INVENTION

[0004] This invention pertains to optimized protein fusion linkers for creating multi-functional chimeric proteins and methods of using the same. Additionally, the invention pertains to chimeric proteins for use in guided endonuclease systems.

### BACKGROUND OF THE INVENTION

[0005] The fusion of guided endonucleases to one or more unrelated enzymes is desirable for many reasons. In some cases, it is useful to visualize and monitor successful delivery of guided endonuclease reagents into the target cell nucleus or nucleolus. In other cases, it may be useful to fuse DNA modifying enzymes to affect a specific repair outcome after guided endonuclease cleavage.

[0006] The construction of recombinant fusion protein requires the selection of a suitable linker to join the protein domains. Direct fusion of functional domains without a linker may lead to many problems, including misfolding of the fusion protein, low yield in protein production, or impaired bioactivity. For example, a barrier to using engineered nucleases fused to a fluorescent protein is that such fusions tend to have lower editing activity presumably due to steric interference caused by the unnatural fusion of the two proteins.

[0007] Achieving high functional activity for the fusion proteins can be dependent on the nature of the linker between the subunits as direct fusion of proteins can inhibit folding, stability and biological activity. Additionally, linked domains can interfere with each other's functions and physically separating these domains can lead to improved function. The nature of the linker between domains can influence average separation distances depending on linker rigidity and length.

[0008] Linkers are typically placed in three classifications: flexible, rigid, and cleavable. Flexible linkers usually consist of glycine repeats, with the periodic addition of a polar serine residue to disrupt linker-protein interaction. Rigid linkers include A(EAAAK)ₙA (SEQ ID NO: 439) repeats that form an alpha helical structure or a Pro-rich sequence, (XP)ₙ (SEQ ID NO: 440) that form relatively rigid extended rod like structures.

[0009] As such, what are needed are methods and compositions to overcome the existing challenges of current technologies. New methods and compositions for a set of universal peptide linkers that have been specifically optimized in guided endonucleases enzyme fusions is desirable to improve function of the guided endonuclease as well as the covalently fused protein partner.

### BRIEF SUMMARY OF THE INVENTION

[0010] In general, this invention pertains to methods and compositions for improved multi-functional chimeric proteins and improved linkers. In some embodiments the chimeric proteins comprise guided endonuclease proteins such as RNA guided endonucleases (“RGEN(s)”), including a Cas/CRISPR protein that are covalently fused to a partner protein with a set of universal peptide linkers. In additional embodiments, the fusion protein comprises rigid linker systems to fuse two proteins. In a further embodiment, the rigid linkers may be used for fusion proteins comprising a Cas protein fused to a fluorescent protein.

[0011] The fusion of Cas proteins of guided endonucleases to one or more unrelated protein partners is desirable for many reasons. For example, one embodiment includes the ability to generate CRISPR/Cas9 protein fusions to cleave double stranded DNA at precise locations in living cells. Cas9 is an RNA guided endonuclease from Clustered Regularly Interspaced Short Palindromic Repeat (CRISPR)-Cas (CRISPR-associated)) bacterial adaptive immune system of Streptococcus pyogenes. Cas9 is guided to a 23-nt DNA target sequence by a target site specific 20-nt complementary RNA (part of the 44-nt crRNA) and a universal 89-nt tracrRNA, collectively referred to as the guide RNA (gRNA) complex. The Cas9-gRNA ribonucleoprotein (RNP) complex mediates double-stranded DNA breaks (DSBs) which are then repaired by either the non-homologous end joining (NHEJ), which typically introduces mutations or indels at the cut site that frequently lead to gene disruption through frameshift mutation or the homology directed repair (HDR) system if a suitable template nucleic acid is present.

[0012] In one embodiment, a set of universal peptide linkers that have been specifically optimized for CRISPR enzyme fusions is desirable to improve the function of both Cas9 and the covalently-fused partner protein or protein domain. The universal linkers would not be specific to a Cas9 protein or any mutant variant thereof. In an additional embodiment, the CRISPR enzyme could be optimally linked with the universal linkers to a fluorescent protein.

[0013] In one embodiment, rigid linkers are used to covalently fuse two different proteins or protein domains. In one respect, the rigid linkers include A(EAAAK)nA (SEQ ID NO: 439) repeats that form an alpha helical structure to provide rigidity is used. In another respect, a (XP)n (SEQ ID NO: 440) repeat that forms relatively rigid extended rod like structures is used.

[0014] In a first aspect, a chimeric protein is provided. The chimeric protein includes a guided endonuclease protein, a rigid linker, and a second protein.

[0015] In a second aspect, a method of enriching cells having a chimeric protein is provided. The method includes several steps. The first step includes incubating a chimeric protein according to the first aspect with a guide RNA to form a RNP complex. The second step includes contacting the RNP complex to a plurality of target cells to produce recipient cells having the RNP complex. The third step includes sorting the recipient cells based on a fluorescence signal.

[0016] In a third aspect, an isolated nucleic acid encoding a chimeric protein is provided. The chimeric protein includes the chimeric protein of the first aspect.

[0017] In a fourth aspect, a chimeric protein is provided. The chimeric protein includes a guided endonuclease protein, a universal linker, and a second protein.

[0018] In a fifth aspect, an isolated nucleic acid is provided. The isolated nucleic acid encodes the chimeric protein according to any of respects of the fourth aspect.

[0019] In a sixth aspect, a method of enriching cells having a chimeric protein is provided. The method includes several steps. The first step includes incubating a chimeric protein according to any of the respects of the fourth aspect with a guide RNA to form a RNP complex. The second step includes contacting the RNP complex to a plurality of target cells to produce recipient cells having the RNP complex. The third step includes sorting the recipient cells based on a fluorescence signal.

### BRIEF DESCRIPTION OF THE DRAWINGS

[0020] FIG. 1A depicts percent cleavage endonuclease activity of Cas9-eGFP linker variants (L1, Cas9-GSAGSAAGSGEF (SEQ ID NO: 6)-eGFP (SEQ ID NO: 38); L2, Cas9-(AP)₇A (SEQ ID NO: 16)-eGFP (SEQ ID NO: 49); L3, Cas9-A(EAAAK)₄A (SEQ ID NO: 8)-eGFP (SEQ ID NO: 40); L4, Cas9-GGGGSEAAAKGGGG (SEQ ID NO: 430)-eGFP (SEQ ID NO: 71) and L5, Cas9-(GGGGS)₄A (SEQ ID NO: 431)-eGFP (SEQ ID NO: 39)) compared to untagged Cas9 protein (denoted as “C” (SEQ ID NO: 1)) delivered as plasmid (400 ng), with sgRNA guide targeting HPRT-38087 (SEQ ID NO: 324) delivered by reverse transfection 24 hours after plasmid delivery. The editing activity after 48 hours was measured by T7E1 assay.

[0021] FIG. 1B depicts percent cleavage endonuclease activity of Cas9-eGFP linker variants (L1, Cas9-GSAGSAAGSGEF (SEQ ID NO: 6)-eGFP (SEQ ID NO: 38); L2, Cas9-(AP)₇A-(SEQ ID NO: 16)eGFP (SEQ ID NO: 49; L3, Cas9-A(EAAAK)₄A (SEQ ID NO: 8)-eGFP (SEQ ID NO: 40); L4, Cas9-GGGGSEAAAKGGGG (SEQ ID NO: 430)-eGFP (SEQ ID NO: 71) and L5, Cas9-(GGGGS)₄A (SEQ ID NO: 431)-eGFP (SEQ ID NO: 39)) compared to untagged Cas9 protein (denoted as “C” (SEQ ID NO: 1)) delivered as plasmid (400 ng), with sgRNA guide targeting HPRT-38285 (SEQ ID NO: 326) delivered by reverse transfection 24 hours after plasmid delivery. The editing activity after 48 hours was measured by T7E1 assay.

[0022] FIG. 2 depicts percent editing efficiency of plasmid expressed Cas9-eGFP linker variants (Cas9-GSAGSAAGSGEF (SEQ ID NO: 6)-eGFP (SEQ ID NO: 38); Cas9-(AP)₇A (SEQ ID NO: 16)-eGFP (SEQ ID NO: 49); and Cas9-A(EAAAK)₄A (SEQ ID NO: 8)-eGFP (SEQ ID NO: 40)) compared to untagged Cas9 protein (SEQ ID NO: 1), with gRNA delivered into HEK293 cells by reverse transfection 24 hours after plasmid delivery. The data are displayed as box and whiskers plots showing the aggregated cleavage efficiency over 12 gRNAs that target distinct loci with HPRT (SEQ ID NOS: 319-330). Cleavage efficiency was measured with T7EI assay 48 hours after transfection.

[0023] FIG. 3A depicts editing efficiency of plasmid-expressed Cas9-eGFP linker variants (L1, Cas9-GSAGSAAGSGEF (SEQ ID NO: 6)-eGFP (SEQ ID NO: 38); L2, Cas9-(AP)₇A (SEQ ID NO: 16)-eGFP (SEQ ID NO: 49); L3, Cas9-A(EAAAK)₄A (SEQ ID NO: 8)-eGFP (SEQ ID NO: 40); L4, Cas9-A(EAAAK)₄ALEA(EAAAK)₄A (SEQ ID NO: 9)-eGFP (SEQ ID NO: 41); and L5, Cas9-LEA(EAAAK)₄ALEA(EAAAK)₄ALE (SEQ ID NO: 10)-eGFP (SEQ ID NO: 42)) compared to untagged Cas9 protein (denoted as “C,” SEQ ID NO: 1) co-delivered with an sgRNA expression plasmid into HEK293 cells by electroporation, wherein the expressed sgRNA targeted HPRT-38087 (SEQ ID NO: 324). T7E1 cleavage assays were performed on each transfected cell population 72 hours after transfection of both plasmids into the HEK293 cells.

[0024] FIG. 3B depicts editing efficiency of plasmid-expressed Cas9-eGFP linker variants (L1, Cas9-GSAGSAAGSGEF (SEQ ID NO: 6)-eGFP (SEQ ID NO: 38); L2, Cas9-(AP)₇A (SEQ ID NO: 16)-eGFP (SEQ ID NO: 49); L3, Cas9-A(EAAAK)₄A (SEQ ID NO: 8)-eGFP (SEQ ID NO: 40); L4, Cas9-A(EAAAK)₄ALEA(EAAAK)₄A (SEQ ID NO: 9)-eGFP (SEQ ID NO: 41); and L5, Cas9-LEA(EAAAK)₄ALEA(EAAAK)₄ALE (SEQ ID NO: 10)-eGFP (SEQ ID NO: 42)) compared to untagged Cas9 protein (denoted as “C,” SEQ ID NO: 1) co-delivered with an sgRNA expression plasmid into HEK293 cells by electroporation, wherein the expressed sgRNA targeted HPRT-38285 (SEQ ID NO: 326). T7E1 cleavage assay was performed 72 hours after transfection of both plasmids into the HEK293 cells.

[0025] FIG. 4A depicts editing efficiency of plasmid expressed Cas9-eGFP linker variants (1, Cas9-GSAGSAAGSGEF (SEQ ID NO: 6)-eGFP (SEQ ID NO: 38); 2, Cas9-APA-eGFP (SEQ ID NO: 43); 3, Cas9-(AP)₂A (SEQ ID NO: 11)-eGFP (SEQ ID NO: 44); 4, Cas9-(AP)₃A (SEQ ID NO: 12)-eGFP (SEQ ID NO: 45); 5, Cas9-(AP)₄A (SEQ ID NO: 13)-eGFP (SEQ ID NO: 46); 6, Cas9-(AP)₅A (SEQ ID NO: 14)-eGFP (SEQ ID NO: 47); 7, Cas9-(AP)₆A (SEQ ID NO: 15)-eGFP (SEQ ID NO: 48); 8, Cas9-(AP)₇A (SEQ ID NO: 16)-eGFP (SEQ ID NO: 49); 9, Cas9-(AP)₈A (SEQ ID NO: 17)-eGFP (SEQ ID NO: 50); 10, Cas9-(AP)₉A (SEQ ID NO: 18)-eGFP (SEQ ID NO: 51); 11, Cas9-(AP)₁₀A (SEQ ID NO: 6)-eGFP (SEQ ID NO: 52); 12, Cas9-(AP)₁₁A (SEQ ID NO: 20)-eGFP (SEQ ID NO: 53); 13, Cas9-(AP)₁₂A (SEQ ID NO: 21)-eGFP (SEQ ID NO: 54); 14, Cas9-(AP)₁₃A (SEQ ID NO: 22)-eGFP (SEQ ID NO: 55); and 15, Cas9-(AP)₁₄A (SEQ ID NO: 23)-eGFP (SEQ ID NO: 56)) compared to untagged Cas9 protein (denoted as “C,” SEQ ID NO: 1), co-delivered with sgRNA expression plasmid into HEK293 cells by electroporation, wherein the expressed sgRNA targeted HPRT-38087 (SEQ ID NO: 324). T7E1 cleavage assay was performed 72 hours after transfection of both plasmids into the HEK293 cells.

[0026] FIG. 4B depicts editing efficiency of plasmid expressed Cas9-eGFP linker variants (1, Cas9-GSAGSAAGSGEF (SEQ ID NO: 6)-eGFP (SEQ ID NO: 38); 2, Cas9-APA-eGFP (SEQ ID NO: 43); 3, Cas9-(AP)₂A (SEQ ID NO: 11)-eGFP (SEQ ID NO: 44); 4, Cas9-(AP)₃A (SEQ ID NO: 12)-eGFP (SEQ ID NO: 45); 5, Cas9-(AP)₄A (SEQ ID NO: 13)-eGFP (SEQ ID NO: 46); 6, Cas9-(AP)₅A (SEQ ID NO: 14)-eGFP (SEQ ID NO: 47); 7, Cas9-(AP)₆A (SEQ ID NO: 15)-eGFP (SEQ ID NO: 48); 8, Cas9-(AP)₇A (SEQ ID NO: 16)-eGFP (SEQ ID NO: 49); 9, Cas9-(AP)₈A (SEQ ID NO: 17)-eGFP (SEQ ID NO: 50); 10, Cas9-(AP)₉A (SEQ ID NO: 18)-eGFP (SEQ ID NO: 51); 11, Cas9-(AP)₁₀A (SEQ ID NO: 19)-eGFP (SEQ ID NO: 52); 12, Cas9-(AP)₁₁A (SEQ ID NO: 20)-eGFP (SEQ ID NO: 53); 13, Cas9-(AP)₁₂A (SEQ ID NO: 21)-eGFP (SEQ ID NO: 54); 14, Cas9-(AP)₁₃A (SEQ ID NO: 22)-eGFP (SEQ ID NO: 55); and 15, Cas9-(AP)₁₄A (SEQ ID NO: 23)-eGFP (SEQ ID NO: 56)) compared to untagged Cas9 protein (denoted as “C,” SEQ ID NO: 1), co-delivered with sgRNA expression plasmid into HEK293 cells by electroporation, wherein the expressed sgRNA targeted HPRT-38285 (SEQ ID NO: 326). T7E1 cleavage assay was performed 72 hours after transfection of both plasmids into the HEK293 cells.

[0027] FIG. 5A depicts the editing efficiency of Cas9-GFP linker variants (1, Cas9-GSAGSAAGSGEF (SEQ ID NO: 6)-eGFP (SEQ ID NO: 38); 2, Cas9-(AP)₇A (SEQ ID NO: 16)-eGFP (SEQ ID NO: 49); 3, Cas9-(AP)₉A (SEQ ID NO: 18)-eGFP (SEQ ID NO: 51); 4, Cas9-GSAGSAAGSGEF (SEQ ID NO: 6)-mCherry (SEQ ID NO: 72); 5, Cas9-(AP)₇A (SEQ ID NO: 16)-mCherry (SEQ ID NO: 83); and 6, Cas9-(AP)₉A (SEQ ID NO: 18)-mCherry (SEQ ID NO: 85)) compared to untagged Cas9 protein (denoted as “C,” SEQ ID NO: 1), delivered at a concentration of 0.0625 micromolar into HEK293 cells. The data are displayed as box and whiskers plots showing the aggregated cleavage efficiency over 12 gRNAs that target distinct loci with HPRT (SEQ ID NOS: 319-330). Cleavage efficiency was measured with T7EI assay 48 hours after transfection.

[0028] FIG. 5B depicts the editing efficiency of Cas9-GFP linker variants (1, Cas9-GSAGSAAGSGEF (SEQ ID NO: 6)-eGFP (SEQ ID NO: 38); 2, Cas9-(AP)₇A (SEQ ID NO: 16)-eGFP (SEQ ID NO: 49); 3, Cas9-(AP)₉A (SEQ ID NO: 18)-eGFP (SEQ ID NO: 51); 4, Cas9-GSAGSAAGSGEF (SEQ ID NO: 6)-mCherry (SEQ ID NO: 72); 5, Cas9-(AP)₇A (SEQ ID NO: 16)-mCherry (SEQ ID NO: 83); and 6, Cas9-(AP)₉A (SEQ ID NO: 18)-mCherry (SEQ ID NO: 85)) compared to untagged Cas9 protein (denoted as “C,” SEQ ID NO: 1), delivered at a concentration of 0.25 micromolar into HEK293 cells. The data are displayed as box and whiskers plots showing the aggregated cleavage efficiency over 12 gRNAs that target distinct loci with HPRT (SEQ ID NOS: 319-330). Cleavage efficiency was measured with T7EI assay 48 hours after transfection.

[0029] FIG. 5C depicts the editing efficiency of Cas9-GFP linker variants (1, Cas9-GSAGSAAGSGEF (SEQ ID NO: 6)-eGFP (SEQ ID NO: 38); 2, Cas9-(AP)₇A (SEQ ID NO: 16)-eGFP (SEQ ID NO: 49); 3, Cas9-(AP)₉A (SEQ ID NO: 18)-eGFP (SEQ ID NO: 51); 4, Cas9-GSAGSAAGSGEF (SEQ ID NO: 6)-mCherry (SEQ ID NO: 72); 5, Cas9-(AP)₇A (SEQ ID NO: 16)-mCherry (SEQ ID NO: 83); and 6, Cas9-(AP)₉A (SEQ ID NO: 18)-mCherry (SEQ ID NO: 85)) compared to untagged Cas9 protein (denoted as “C,” SEQ ID NO: 1), delivered at a concentration of 2.0 micromolar into HEK293 cells. The data are displayed as box and whiskers plots showing the aggregated cleavage efficiency over 12 gRNAs that target distinct loci with HPRT (SEQ ID NOS: 319-330). Cleavage efficiency was measured with T7EI assay 48 hours after transfection.

[0030] FIG. 6 depicts the effect of FACS selection of GFP signal cells on editing by Cas9-eGFP fusion proteins in HEK293 cells compared to unsorted cells. An RNP comprising chimeric Cas9-(AP)₇A (SEQ ID NO: 16)-eGFP protein (SEQ ID NO: 49) duplexed with guide RNAs was introduced into HEK293 cells by lipofection at a final concentration of 10 nM. Cells were sorted into three populations based on GFP signal corresponding to high medium and low GFP signal (high GFP signal, the top ˜20% of signal; medium GFP signal, the mid ˜80-60% of signal, and low GFP signal, the bottom ˜-60% of signal). Next Generation Sequencing (NGS) of target sites was performed for each population to measure total editing activity percentage 48-72 hours after transfection.

[0031] FIG. 7 depicts exemplary results for the editing efficiency of LbCas12a (E795L)-GFP linker variants (1, LbCas12a (E795L)-eGFP (SEQ ID NO: 314); 2, LbCas12a (E795L)-A(EAAAK)₄A (SEQ ID NO: 8)-eGFP (SEQ ID NO: 244); 3, LbCas12a (E795L)-(GGGS)₄ (SEQ ID NO: 7)-eGFP (SEQ ID NO: 243); 4, LbCas12a (E795L)-(AP)₇A (SEQ ID NO: 16)-eGFP (SEQ ID NO: 253); 5, LbCas12a (E795L)-(AP)₉A (SEQ ID NO: 18)-eGFP (SEQ ID NO: 255); and 6, LbCas12a (E795L)-A(EAAAK)₄ALEA(EAAAK)₄A (SEQ ID NO: 9)-eGFP (SEQ ID NO: 245); compared to untagged LbCas12a (E795L) protein (denoted as “C,” SEQ ID NO: 310), delivered at a concentration of 50 nM into HEK293 cells, with select ALT-R® LbCas12a crRNAs that target distinct loci with HPRT. Results shown for 38115: Cpf1 HPRT 38115-AS (SEQ ID NO: 333) and 38186: Cpf1 HPRT 38186-S(SEQ ID NO: 334); comparable results were obtained for two additional guide RNAs (Cpf1 HPRT 38330-AS (SEQ ID NO: 335) and Cpf1 HPRT 38486-S (SEQ ID NO: 336)) (data not shown).

### DETAILED DESCRIPTION OF THE INVENTION

[0032] The methods and compositions of the invention described herein provide for improved universal linkers for covalently fusing two or more proteins or protein domains. Additionally, the present invention describes methods of using the chimeric fusions. In particular, the disclosed chimeric proteins provide a robust manner whereby cells that contain the chimeric protein may be identified and sorted based upon the ability of the chimeric protein to generate a fluorescence signal. Moreover, not only do the chimeric proteins retain their enzymatic activity as guided endonucleases, but also several chimeric proteins possess surprisingly enhanced activity when compared to unmodified endonucleases or fusion proteins lacking a linker. These and other advantages of the invention, as well as additional inventive features, will be apparent from the description of the invention provided herein.

### Definitions

[0033] The use of the terms “a” and “an” and “the” and similar referents in the context of describing the invention (especially in the context of the following claims) are to be construed to cover both the singular and the plural, unless otherwise indicated herein or clearly contradicted by context. The terms “comprising”, “having”, “including” and “containing” are to be construed as open-ended terms (i.e., meaning “including, but no limited to”) unless otherwise noted. Recitation of ranges of values herein are merely intended to serve as a shorthand method of referring individually to each separate value falling within the range, unless otherwise indicated herein, and each separate value is incorporated into the specification as if it were individually recited herein. All methods described herein can be performed in any suitable order unless otherwise indicated herein or otherwise clearly contradicted by context. The use of any and all examples, or exemplary language (e.g., “such as”) provided herein, is intended merely to better illuminate the invention and does not pose a limitation on the scope of the invention unless otherwise claimed. No language in the specification should be construed as indicating any non-claimed element as essential to the practice of the invention.

[0034] The term, “codon-optimized” as that term modifies “nucleic acid,” “gene,” “DNA,” or “RNA,” that encodes a protein or polypeptide, refers to a nucleic acid, gene, DNA or RNA that includes preferred codons for efficient expression of the protein or polypeptide in a given host cell or organism based upon the naturally occurring abundance of charged tRNA's specific for codons in that host cell or organism. By way of example, a codon-optimized Cas9 nucleic acid for E. coli will be suitable for optimal expression of the Cas9 protein when that nucleic acid is expressed in E coli. Similarly, a codon-optimized Cas9 nucleic acid for human cells will be suitable for optimal expression of the Cas9 protein when that nucleic acid is expressed in a human cell. Exemplary codon-optimized nucleic acids are disclosed herein. A codon-optimized nucleic acid, gene, DNA, RNA can be readily generated from a naturally occurring endogenous DNA or RNA derived from the original host cell or organism or from reverse translation of the protein amino acid sequence for the relevant protein or polypeptide sequence. One of ordinary skill in the art would understand from the literature the codon bias or preference rules for a variety of host cells or organisms. Furthermore, codon-optimized nucleic acid conversion software programs are readily available online or generally known in the art.

[0035] The terms “RNA-guided endonuclease” and “RGEN” refer to a ribonucleoprotein endonuclease that includes an RNA component for targeted enzyme activity on a given substrate. Exemplary RGEN's include CRISPR-associated endonucleases.

[0036] The term “CRISPR” refers to Clustered Regularly Interspaced Short Palindromic Repeat bacterial adaptive immune system.

[0037] The terms “Cas” and “Cas endonuclease” generally refers to a CRISPR-associated endonuclease.

[0038] The term “Cas protein” generally refers to a wild-type protein, including a variant thereof, of a CRISPR-associated endonuclease (including the interchangeable terms Cas and Cas endonuclease).

[0039] The term “Cas nucleic acid” generally refers to a nucleic acid of a CRISPR-associated endonuclease, including a guide RNA, sgRNA, crRNA, or tracrRNA.

[0040] The terms “Cas9” and “CRISPR/Cas9” refer to the CRISPR-associated bacterial adaptive immune system of Streptococcus pyogenes.

[0041] The terms “AsCas12a” and “CRISPR/AsCas12a” refer to the CRISPR-associated bacterial adaptive immune system of Acidaminococcus sp.

[0042] The terms “LbCas12a” and “CRISPR/LbCas12a” refer to the CRISPR-associated bacterial adaptive immune system of Lachnospiraceae bacterium.

[0043] The term “Cas9 protein” refers to the protein of the Cas9 or CRISPR/Cas9 endonuclease system. For the purposes of this disclosure, the wild-type Cas9 protein amino acid sequence is SEQ ID NO: 1.

[0044] The term “AsCas12a protein” refers to the protein of the AsCas12a or CRISPR/AsCas12a endonuclease system. For the purposes of this disclosure, the wild-type AsCas12a protein amino acid sequence is SEQ ID NO: 2.

[0045] The term “LbCas12a protein” refers to the protein of the LbCas12a or CRISPR/LbCas12a endonuclease system. For the purposes of this disclosure, the wild-type LbCas12a protein amino acid sequence is SEQ ID NO: 3.

[0046] The term “Cas9 nucleic acid” refers to a nucleic acid (e.g., DNA or RNA) that encodes a Cas9 protein or polypeptide. A Cas9 nucleic acid can be selected from the naturally occurring nucleic acid from Streptococcus pyogenes or a codon-optimized nucleic acid for efficient expression in a given host cell or organism. For the purposes of this disclosure, exemplary codon-optimized versions of a Cas9 nucleic acid are SEQ ID NOS: 337 and 338.

[0047] The term “AsCas12a nucleic acid” refers to a nucleic acid (e.g., DNA or RNA) that encodes a AsCas12a protein or polypeptide. An AsCas12a nucleic acid can be selected from the naturally occurring nucleic acid from Acidaminococcus sp. or a codon-optimized nucleic acid for efficient expression in a given host cell or organism. For the purposes of this disclosure, exemplary codon-optimized versions of a AsCas12a nucleic acid are SEQ ID NOS: 339 and 340.

[0048] The term “LbCas12a nucleic acid” refers to a nucleic acid (e.g., DNA or RNA) that encodes a LbCas12a protein or polypeptide. A LbCas12a nucleic acid can be selected from the naturally occurring nucleic acid from Lachnospiraceae bacterium or a codon-optimized nucleic acid for efficient expression in a given host cell or organism. For the purposes of this disclosure, exemplary codon-optimized versions of a LbCas12a nucleic acid are SEQ ID NOS: 341 and 342.

[0049] The terms “guide RNA,” “guide RNA complex” and “gRNA complex” refer to a target site-specific crRNA, a universal tracrRNA or a combination of both.

[0050] The term “sgRNA” refers to a guide RNA complex in which the crRNA is covalently linked to the tracrRNA in a single molecule.

[0051] The term “variant,” as that term modifies a protein (for example, a Cas9 protein, AsCas12a protein or LbCas12a protein), refers to a protein that includes at least one amino substitution of the reference wild-type protein amino acid sequence, additional amino acids (for example, such as an affinity tag or nuclear localization signal), or a combination thereof. An exemplary LbCas12a protein variant amino acid sequence is LbCas12a (E795L) (SEQ ID NO: 310), and chimeric proteins comprising this amino acid sequence is presented in Tables V.7, V.8 and V.10.

[0052] The term ALT-R®, as that term modifies an RNA (for example, such as a crRNA, a tracrRNA, a guide RNA, or a sgRNA), refers to an isolated, chemically-synthesized, synthetic RNA.

[0053] The term ALT-R®, as that term modifies a protein (for example, such as a Cas9 protein, an AsCas12a protein, or a LbCas12a protein), refers to an isolated, recombinant protein.

[0054] The terms “fusion protein,” “protein fusion,” “chimeric protein,” “protein chimera,” and “chimeric fusion protein” refer to a first protein or polypeptide having a covalent bond to at least one or more proteins or polypeptides, wherein the at least one or more proteins or polypeptides differ in primary sequence composition from the first protein or polypeptide. The terms fusion protein, protein fusion, chimeric protein, protein chimera and chimeric fusion protein have the same meaning and are used interchangeably. Exemplary fusion proteins are disclosed herein.

[0055] The term “universal,” as applied to modify a “guide RNA,” a “linker,” or a “linker peptide, refers to a guide RNA, linker or linker peptide for use as a guide RNA, linker or linker peptide in more than one RGEN (as related to a guide RNA) or more than one fusion protein, (as related to a linker or linker peptide). Exemplary universal linkers and universal linker peptides include flexible linkers, rigid linkers and mixed linkers, including those linkers identified in Table I and references cited therein, which are incorporated by reference in their entirety.

[0056] The term “editing activity assay” refers to an assay to determine the extent of editing of a locus by an RGEN, such as a Cas endonuclease, on at least one locus targeted by the guide RNA. Exemplary editing activity assays include those selected from a T7EI assay and a Next Generation Sequencing (NGS) assay. Exemplary T7EI assay procedures are disclosed in U.S. patent application Ser. No. 14/975,709, filed Dec. 18, 2015 (Attorney Docket IDT01-008-US), the contents of which are incorporated by reference herein. Exemplary NGS assays are disclosed in U.S. patent application Ser. No. 13/935,451, filed Jul. 3, 2013 (Attorney Docket IDT01-001-US), the contents of which are incorporated by reference herein.

[0057] The terms “linker” and “linker polypeptide” refers to a polypeptide amino acid sequence of 2 or more amino acids that covalently join a first protein or polypeptide to a second protein polypeptide. Exemplary linkers and linker polypeptides are disclosed herein.

[0058] The term “rigid linker” refers to a linker that restricts at least one degree of freedom in the motion or conformation for an affected fusion protein, protein fusion, chimeric protein, or protein chimera that includes the linker. Exemplary rigid linkers are disclosed herein.

[0059] In a first embodiment a composition for an improved multi-functional chimeric protein and improved linkers is provided. In another respect the universal peptide linker is a rigid linker system.

[0060] In another embodiment, the rigid link is used to fuse two proteins, recombinant proteins, or protein domains into a single covalently fused protein construct. In one respect the Alpha helix forming linker with the sequence of (EAAAK)n (SEQ ID NO: 433) is used. In another respect the EAAAK (SEQ ID NO: 432) amino acid sequence is repeated n times where n represents 1, 2, 3, 4, 5, 6, 7, 8, 9, 10, 11, 12, 13, or 14 repeats.

[0061] In another embodiment, the rigid linker is a Pro-rich sequence. In a further respect, the Pro-rich sequence is (XP)n (SEQ ID NO: 434) with X designating any amino acid, including preferably Ala, Lys, or Glu and more preferably Alanine. In another respect, the XP sequence is repeated n times where n represent 1, 2, 3, 4, 5, 6, 7, 8, 9, 10, 11, 12, 13, or 14 repeats. In another respect, the number of repeats is preferably 5, 6, 7, 8, or 9 repeats. In another respect the number of repeats is more preferably 7 or 9 repeats.

[0062] In another embodiment, the rigid linker is a Pro-rich sequence. In a further respect, the Pro-rich sequence is (XP)nA (SEQ ID NO: 435) with X designating any amino acid, including preferably Ala, Lys, or Glu and more preferably, Alanine and where the XP sequence is repeated n times in the range from 1-14 repeats, including n being 1, 2, 3, 4, 5, 6, 7, 8, 9, 10, 11, 12, 13, or 14 repeats. In another respect the number of repeats is preferably 5, 6, 7, 8, or 9 repeats. In another respect the number of repeats is more preferably 7 or 9 repeats.

[0063] In another embodiment, the rigid linker is used to covalently fuse a guided endonuclease and a second protein. In one respect, the rigid linker is used to covalently fuse the C-terminal end of a guided endonuclease to the N-terminal end of the second protein. Preferably, the rigid linker is used to covalently fuse the C-terminal of a RGEN to the N-terminal of a second protein. More preferably, the rigid linker is used to covalently fuse the C-terminal of a CRISPR-Cas to the N-terminal of a second protein.

[0064] In a further embodiment, the Pro-rich (XP)n (SEQ ID NO: 434) rigid linker, where n is the repeat unit in the range from 1-14 repeats including n being 1, 2, 3, 4, 5, 6, 7, 8, 9, 10, 11, 12, 13, or 14 repeats, is used to covalently fuse the C-terminal end of a guided endonuclease to the N-terminal end of a second protein. Preferably, the (XP)n (SEQ ID NO: 434) rigid linker is used to covalently fuse the C-terminal of a RGEN to the N-terminal of a second protein. More preferably, the (XP)n (SEQ ID NO: 434) rigid linker is used to covalently fuse the C-terminal of a Cas protein to the N-terminal of a second protein.

[0065] In another embodiment, the Pro-rich sequence includes a (PX)nP (SEQ ID NO: 436) rigid linker system, where n is the repeat unit in the range from 1-14 repeats including n being 1, 2, 3, 4, 5, 6, 7, 8, 9, 10, 11, 12, 13, or 14 repeats. In one respect, the Pro-rich sequence includes (PA)nP (SEQ ID NO: 437) rigid linker system where n is the repeat unit in the range from 1-14 repeats including n being 1, 2, 3, 4, 5, 6, 7, 8, 9, 10, 11, 12, 13, or 14 repeats. In another respect, the Pro-rich sequence includes (PA)₆P (SEQ ID NO: 438) rigid linker system.

[0066] In another embodiment, the rigid linker is used to covalently fuse the C-terminal end of a first protein to the N-terminal of guided endonuclease. In another respect, the rigid linker is used to covalently fuse the C-terminal of a first protein to the N-terminal of a RGEN. In another respect, the rigid linker is used to covalently fuse the C-terminal of a first protein to the N-terminal of a Cas protein.

[0067] In another embodiment, the Pro-rich (XP)n (SEQ ID NO: 434) rigid linker is used to covalently fuse the C-terminal end of a first protein to the N-terminal of guided endonuclease. In another respect, the (XP)n (SEQ ID NO: 434) linker is used to covalently fuse the C-terminal of a first protein to the N-terminal of a RGEN. In another respect the (XP)n (SEQ ID NO: 434) rigid linker is used to covalently fuse the C-terminal of a first protein to the N-terminal of a Cas protein.

[0068] In another embodiment, the CRISPR/Cas9 protein is one of the proteins covalently fused to the rigid linker. In one respect, the Cas9 protein may be a wild type Cas9 protein. In another respect the Cas protein may be a mutant or variant protein.

[0069] In another embodiment, the first protein is a guided endonuclease joined through a rigid linker to a fluorescent protein. Preferably, the guided endonuclease is an RGEN and more preferably is a CRISPR/Cas enzyme. In one respect, the fluorescent protein is eGFP or mCherry. In another aspect, the CRISPR/Cas enzyme is covalently linked to the fluorescent protein with a rigid linker to generate a CRISPR/Cas fluorescent chimeric fusion protein. The CRISPR/Cas fluorescent fusion protein allows for the ability to visualize and monitor successful delivery of CRISPR/Cas reagents into the target cell nucleus or nucleolus. In another respect, the cells may be sorted and enriched for based on the detection of the fluorescent fusion protein.

[0070] In a first aspect, a chimeric protein is provided. The chimeric protein includes a guided endonuclease protein, a rigid linker, and a second protein. In a first respect, the guided endonuclease protein is a Cas protein. In a second respect, the Cas protein is selected from the group consisting of Cas9 protein, AsCas12a protein, LbCas12a protein and a variant of Cas9 protein, AsCas12a protein, or LbCas12a protein. In a third respect, the Cas protein is selected from the group comprising SEQ ID NOS: 1, 2, and 3. In a fourth respect, the Cas protein is preferably SEQ ID NO: 1. In a fifth respect, the Cas protein is preferably SEQ ID NO: 2. In a sixth respect, the Cas protein is preferably SEQ ID NO: 3. In a seventh respect, the second protein is a fluorescent protein. In an eighth respect, the fluorescent protein is selected from the group comprising SEQ ID NOS: 4 and 5. In a ninth respect, the fluorescent protein is SEQ ID NO: 4. In a tenth respect, the fluorescent protein is SEQ ID NO: 5. In an eleventh respect, the rigid linker is selected from the group comprising XP, APA, and SEQ ID NOS: 8, 11-23 and 24-36. In a twelve respect, the rigid linker is SEQ ID NO: 8. In a thirteenth respect, the rigid linker is selected from the group comprising XP and SEQ ID NOS: 24-36. In a fourteenth respect, the rigid linker is selected from SEQ ID NOS: 29-31. In a fifteenth respect, the rigid linker is selected from the group comprising APA and SEQ ID NOS: 11-23. In a sixteenth respect, the rigid linker is selected from the group comprising APA and SEQ ID NOS: 17-18. In an eighteenth respect, the chimeric protein is selected from the group that includes SEQ ID NOS: 40-70, 74-104, 108-138, 142-172, 176-206, 210-240, 244-274, and 278-308.

[0071] In a second aspect, a method of enriching cells having a chimeric protein is provided. The method includes several steps. The first step includes incubating a chimeric protein according to the first aspect with a guide RNA to form a RNP complex. The second step includes contacting the RNP complex to a plurality of target cells to produce recipient cells having the RNP complex. The third step includes sorting the recipient cells based on a fluorescence signal. In a first respect, the method includes an additional step of performing an editing activity assay on at least one locus targeted by the guide RNA. In a second respect, the step of performing an editing activity assay on at least one locus targeted by the guide RNA is selected from an T7EI assay and a Next Generation Sequencing assay. In a third respect, the method includes a chimeric protein selected from the group consisting of SEQ ID NOS: 40-70, 74-104, 108-138, 142-172, 176-206, 210-240, 244-274, and 278-308.

[0072] In a third aspect, an isolated nucleic acid encoding a chimeric protein is provided. The chimeric protein includes the chimeric protein of the first aspect. In a first respect, the chimeric protein comprises a member selected from the group consisting of SEQ ID NOS: 40-70, 74-104, 108-138, 142-172, 176-206, 210-240, 244-274, and 278-308. In a second respect, wherein the isolated nucleic acid is codon optimized for expression in an organism or host cell. In a third respect, the organism or host cell is selected from E coli or H. sapiens.

[0073] In a fourth aspect, a chimeric protein is provided. The chimeric protein includes a guided endonuclease protein, a universal linker, and a second protein. In a first respect, the guided endonuclease protein is a Cas protein. In a second respect, the Cas protein is selected from the group consisting of Cas9 protein, AsCas12a protein, LbCas12a protein, and a variant of Cas9 protein, AsCas12a protein, and LbCas12a protein. In a third respect, the Cas protein is selected from the group comprising SEQ ID NOS: 1, 2, and 3. In a fourth respect, the Cas protein is SEQ ID NO: 1. In a fifth respect, the Cas protein is SEQ ID NO: 2. In a sixth respect, the Cas protein is SEQ ID NO: 3. In a seventh respect, the second protein is a fluorescent protein. In a eighth respect, the fluorescent protein is selected from the group comprising SEQ ID NOS: 4 and 5. In a ninth respect, the fluorescent protein is SEQ ID NO: 4. In a tenth respect, the fluorescent protein is SEQ ID NO: 5. In an eleventh respect according to any of the previous respects of the fourth aspect, the universal linker is selected from a flexible linker, a rigid linker, and a mixed linker. In a twelfth respect, the universal linker comprises a flexible linker selected from the group consisting of SEQ ID NOS: 6 and 7. In a thirteenth respect, the universal linker comprises a rigid linker selected from the group consisting of XP, APA, and SEQ ID NOS: 8-36. In a fourteenth respect, the universal linker comprises a mixed linker of SEQ ID NOS: 37. In a fifteenth respect, the chimeric protein is selected from the group consisting of SEQ ID NOS: 38-309.

[0074] In a fifth aspect, an isolated nucleic acid is provided. The isolated nucleic acid encodes the chimeric protein according to any of respects of the fourth aspect. In a first respect, the isolated nucleic acid is codon optimized for expression in an organism or host cell. In a second respect, the organism or host cell is selected from E. coli or H. sapiens. In a third respect, the isolated nucleic acid is selected from the group consisting of SEQ ID NOS: 348-387 and 389-429.

[0075] In a sixth aspect, a method of enriching cells having a chimeric protein is provided. The method includes several steps. The first step includes incubating a chimeric protein according to any of respects of the fourth aspect with a guide RNA to form a RNP complex. The second step includes contacting the RNP complex to a plurality of target cells to produce recipient cells having the RNP complex. The third step includes sorting the recipient cells based on a fluorescence signal. In a first respect, the method includes an additional step of performing an editing activity assay on at least one locus targeted by the guide RNA. In a second respect, the step of performing an editing activity assay on at least one locus targeted by the guide RNA is selected from an T7EI assay and a Next Generation Sequencing assay.

### Example 1

### Linker Effect on Editing Efficiency of Recombinant Cas9

[0076] This example identifies linkers that improve Cas9-eGFP activity. Nineteen separate plasmids that express recombinant versions of Cas9 in mammalian cells were constructed wherein the encoded protein has eGFP positioned downstream of the Cas9 carboxy-terminal domain (CTD) and the peptide sequence between Cas9 and eGFP were varied (Table I).

TABLE I
List of linker sequences.

| SEQ ID | | |
|---|---|---|
| NO: | Linker Sequence | Type |
| 6 | GSAGSAAGSGEF | Flexible¹ |
| 7 | GGGGSGGGGSGGGGSGGGGS | Flexible² |
| 8 | AEAAAKEAAAKEAAAKEAAAKA | Rigid³ |
| 9 | AEAAAKEAAAKEAAAKEAAAKALEAEAAA | Rigid³ |
| | KEAAAKEAAAKEAAAKA | |
| 10 | LEAEAAAKEAAAKEAAAKEAAAKALEAEA | Rigid³ |
| | AAKEAAAKEAAAKEAAAKALE | |
| — | APA | Rigid⁴ |
| 11 | APAPA | Rigid⁴ |
| 12 | APAPAPA | Rigid⁴ |
| 13 | APAPAPAPA | Rigid⁴ |
| 14 | APAPAPAPAPA | Rigid⁴ |
| 15 | APAPAPAPAPAPA | Rigid⁴ |
| 16 | APAPAPAPAPAPAPA | Rigid⁴ |
| 17 | APAPAPAPAPAPAPAPA | Rigid⁴ |
| 18 | APAPAPAPAPAPAPAPAPA | Rigid⁴ |
| 19 | APAPAPAPAPAPAPAPAPAPA | Rigid⁴ |
| 20 | APAPAPAPAPAPAPAPAPAPAPA | Rigid⁴ |
| 21 | APAPAPAPAPAPAPAPAPAPAPAPA | Rigid⁴ |
| 22 | APAPAPAPAPAPAPAPAPAPAPAPAPA | Rigid⁴ |
| 23 | APAPAPAPAPAPAPAPAPAPAPAPAPAPA | Rigid⁴ |
| — | XP | Rigid⁴ |
| 24 | XPXP | Rigid⁴ |
| 25 | XPXPXP | Rigid⁴ |
| 26 | XPXPXPXP | Rigid⁴ |
| 27 | XPXPXPXPXP | Rigid⁴ |
| 28 | XPXPXPXPXPXP | Rigid⁴ |
| 29 | XPXPXPXPXPXPXP | Rigid⁴ |
| 30 | XPXPXPXPXPXPXPXP | Rigid⁴ |
| 31 | XPXPXPXPXPXPXPXPXP | Rigid⁴ |
| 32 | XPXPXPXPXPXPXPXPXPXP | Rigid⁴ |
| 33 | XPXPXPXPXPXPXPXPXPXPXP | Rigid⁴ |
| 34 | XPXPXPXPXPXPXPXPXPXPXPXP | Rigid⁴ |
| 35 | XPXPXPXPXPXPXPXPXPXPXPXPXP | Rigid⁴ |
| 36 | XPXPXPXPXPXPXPXPXPXPXPXPXPXP | Rigid⁴ |
| 37 | GGGGSEAAAKGGGGS | Mixed⁵ |

¹Waldo 1999;
²Gergeron 2009;
³Bae and Shen 2006;
⁴McCormick 2001;
⁵Chen 2017

[0077] The constructs were first assayed through expression from plasmids delivered into HEK293 cells with editing assayed after 48-72 hours by T7EI digestion. Constructs showing improved activity were then subcloned into vectors for protein expression in E. coli and recombinant Cas9-fluorescent protein fusion proteins were purified by immobilized metal affinity chromatography followed by ion exchange chromatography. Purified proteins were tested for Cas9 endonuclease activity when delivered as RNP into HEK293 cells with editing assayed after 48 hours by T7 Endonuclease (T7EI) digestion.

[0078] The editing efficiency of the 19 different recombinant versions of Cas9 protein when expressed form transiently transfected plasmid in HEK293 was determined. Additionally, for a subset of the constructs were delivered as RNP. The methods and compositions disclosed herein identify linkers that result in improved editing efficiency over a baseline flexible linker design. Rigid linkers of both Pro-rich sequence (XP)n (SEQ ID NO: 434) and EAAAK (SEQ ID NO: 432) repeat varieties were found to result in an increase in Cas9 activity when delivered as plasmid. Additionally, it was found that certain (XP)n (SEQ ID NO: 434) repeat structures showed improvement in editing activity when delivered as RNP.

### Example 2

Cas9-eGFP Proteins with Rigid Linkers Expressed from Plasmids Demonstrate Improved Editing Efficiency.

[0079] This example demonstrates that introduction of rigid linkers between Cas9 and eGFP results in an improvement in Cas9 editing activity of a Cas9-eGFP fusion protein when expressed inhuman cells from transfected plasmid. The set of rigid and flexible linkers that were generate in Example 1 were further tested in the context of Cas9-linker-eGFP to assess their impact on Cas9 activity.

[0080] The editing activity of Cas9-eGFP fusion proteins containing either rigid helical [A(EAAAK)₄A](linker SEQ ID NO: 8), rigid alanine-proline [(AP)₇A](linker SEQ ID NO: 16), flexible (GGGGS)₄ (linker SEQ ID NO: 7), or a mixed flexibility linker GGGGSEAAAKGGGGS (linker SEQ ID NO: 37) were compared to wild-type Cas9 protein and the Cas9-eGFP protein with a flexible GSAGSAAGSGEF (Abbreviated GSA; linker SEQ ID NO: 6) linker serving as a baseline for comparison of editing activity. Fusion proteins were expressed from plasmids using a CMV promoter in HEK293 cells. Plasmids were delivered using the Lonza Nucleofector 96-well shuttle, using SF cell line solution, on setting DS-150 with 400 ng protein expression plasmid and 350,000 cells per well, with cells split into three wells following transfection. Two sgRNAs (HPRT-38087 (SEQ ID NO: 324) and HPRT-38285 (SEQ ID NO: 326)) targeting positions within the HPRT1 gene region were delivered at a final concentration of 30 nM by reverse transfection 24 hours after plasmid delivery using Lipofectamine RNAi Max. To analyze editing activity, genomic DNA was extracted 48 hours after reverse transfection using QuickExtract™ DNA extraction solution. Editing was assayed by PCR amplifying an ˜1 kb region of the HPRT1 gene containing target cleavage sites, melting and re-hybridizing the PCR products, digesting the products with T7EI, and quantifying the proportion of cleaved to full length sequence using the Fragment Analyzer (Agilent).

[0081] The results are shown in FIG. 1 with error bars representing the standard deviation between the three biological samples. While all four linkers resulted in improved activity over the baseline GSA linker, both types of rigid linkers resulted in an improvement in editing activity.

### Example 3

[0082] To further test rigid linkers, another experiment was performed using the same protocol as in Example 2. A set of 12 different gRNAs (Table II) targeting positions within the HPRT1 gene were tested. The PCR Primers are provided in Table III.

TABLE II
List of protospacer sequences of sgRNAs

| SEQ ID | | |
|---|---|---|
| NO: | ALT-R ® Sequence (5′→3′) | Name |
| 319 | rUrCrCrArUrUrUrCrArUrArGrUrCrU | HRPT 38094 |
| | rUrUrCrCrUrGrUrUrUrUrArGrArGrC | S-m36 |
| | rUrArUrGrCrU | |
| 320 | rUrUrUrUrGrUrArArUrUrArArCrArG | HRPT 38231 |
| | rCrUrUrGrCrGrUrUrUrUrArGrArGrC | S-m36 |
| | rUrArUrGrCrU | |
| 321 | rCrUrUrArGrArGrArArUrArUrUrUrG | HRPT 38371 |
| | rUrArGrArGrGrUrUrUrUrArGrArGrC | S-m36 |
| | rUrArUrGrCrU | |
| 322 | rUrUrGrArCrUrArUrArArUrGrArArU | HRPT 38509 |
| | rArCrUrUrCrGrUrUrUrUrArGrArGrC | S-m36 |
| | rUrArUrGrCrU | |
| 323 | rCrArArArArCrArCrArGrCrArUrArA | HRPT 38574 |
| | rArArUrUrUrGrUrUrUrUrArGrArGrC | S-m36 |
| | rUrArUrGrCrU | |
| 324 | rArArUrUrArUrGrGrGrGrArUrUrArC | HRPT 38087 |
| | rUrArGrGrArGrUrUrUrUrArGrArGrC | AS-m36 |
| | rUrArUrGrCrU | |
| 325 | rGrGrUrCrArCrUrUrUrUrArArCrArC | HRPT 38133 |
| | rArCrCrCrArGrUrUrUrUrArGrArGrC | AS-m36 |
| | rUrArUrGrCrU | |
| 326 | rCrUrUrArUrArUrCrCrArArCrArCrU | HRPT 38285 |
| | rUrCrGrUrGrGrUrUrUrUrArGrArGrC | AS-m36 |
| | rUrArUrGrCrU | |
| 327 | rGrGrCrUrUrArUrArUrCrCrArArCrA | HRPT 38287 |
| | rCrUrUrCrGrGrUrUrUrUrArGrArGrC | AS-m36 |
| | rUrArUrGrCrU | |
| 328 | rArUrUrUrCrArCrArUrArArArArCrU | HRPT 38358 |
| | rCrUrUrUrUrGrUrUrUrUrArGrArGrC | AS-m36 |
| | rUrArUrGrCrU | |
| 329 | rUrCrArArArUrUrArUrGrArGrGrUrG | HRPT 38636 |
| | rCrUrGrGrArGrUrUrUrUrArGrArGrC | AS-m36 |
| | rUrArUrGrCrU | |
| 330 | rUrArCrArGrCrUrUrUrArUrGrUrGrA | HRPT 38673 |
| | rCrUrArArUrGrUrUrUrUrArGrArGrC | AS-m36 |
| | rUrArUrGrCrU | |

TABLE III
List of Primers

| SEQ ID NO: | Sequence (5′→3′) | Name |
|---|---|---|
| 331 | AAGAATGTTGTGATAAAAGGTGAT | HRPT Low |
| | GCT | GC 7 FWD |
| 332 | ACACATCCATGGGACTTCTGCCTC | HRPT Low |
| | | GC 7 REV |

[0083] The results are shown in FIG. 2. The rigid linkers provided varying levels of improvement depending on the targeted site over the original GSA linker design, with both linkers providing improvement at each site.

### Example 4

[0084] This example demonstrates the effect of linker length by varying the number of alanine-proline repeats between 1 and 14 (APA and linker SEQ ID NOS: 11-23) and testing two different extend helical linker designs. This experiments follows the same protocol as established in Example 2; however, the guide RNA was expressed from plasmid co-delivered at 100 ng per well and the cells were allowed to grow for three days before collecting genomic DNA.

[0085] The results are shown in FIG. 3 and FIG. 4. Example 4 demonstrates that rigid helical linker length or rigid AP linker length are functional across a wide range of repeats.

### Example 5

(AP)₇A (SEQ ID NO:16) and (AP)₉A (SEQ ID NO:18) Linked Cas9-GFP and Cas9-mCherry Editing Activity when Delivered as RNP

[0086] This example demonstrates that introduction of a (AP)₇A linker (SEQ ID NO: 16) or (AP)₉A linker (SEQ ID NO: 18) between Cas9 and eGFP results in an improvement in the editing activity of a Cas9-eGFP fusion protein when delivered into human cells as RNP

[0087] To determine whether rigid linkers increase editing activity for Cas9-GFP when delivered as RNP, Cas9-GFP linker variants containing either the GSA linker, helical rigid linker, or alanine-proline rigid linker were expressed in E coli and purified. RNP complex was formed by incubating Cas9 with ALT-R® sgRNA in PBS in a 1:1.2 ratio for 10 min and then delivered into HEK293 cells at a final RNP concentration of either 0.0625 micromolar, 0.25 micromolar, or 2.0 micromolar, along with 4 micromolar ALT-R® Cas9 Electroporation Enhancer. Editing activity was assayed by T7EI assay as previously described and the results are shown in FIG. 5.

[0088] At the 2 micromolar dose of RNP, an increase in editing activity for linker variants containing the (AP)₇A linker (linker SEQ ID NO: 16; chimeric Cas9 SEQ ID NO: 49) and (AP)₉A linker (linker SEQ ID NO: 18; chimeric Cas9 SEQ ID NO: 51) was observed compared to the flexible GSA linker (linker SEQ ID NO: 6; chimeric Cas9 SEQ ID NO: 38) over the tested sites. The benefit of these linkers was also observed for a second different fluorophore. The second fluorophore tested was mCherry, and the same (AP)ₙA (SEQ ID NO: 441) linkers were used to covalently attach the mCherry to Cas9. As seen in FIG. 5, the same rigid linkers improve Cas9 editing activity.

### Example 6

Enrichment of Cas9-eGFP Fusions with Fluorescence Activated Cell Sorting (FACS)

[0089] This example demonstrates that the use of an (AP)ₙA (SEQ ID NO: 441) linker between Cas9 and eGFP is compatible with use of Cas9-(AP)ₙA-(SEQ ID NO: 441)eGFP use with FACS to enrich for an edited cell population.

[0090] To determine whether Cas9-(AP)nA (SEQ ID NO: 441)-eGFP can be used with FACS to enrich for cells with edits, RNP complex was formed as in Example 5 using a chimeric Cas9-(AP)₇A (SEQ ID NO: 16)-eGFP protein (SEQ ID NO: 49) or wild-type Cas9 (SEQ ID NO: 1) and delivered into cells using Lipofectamine RNAiMAX at 10 nM final concentration in 3 wells of a 6 well dish with 1.2 million cells per well. After ˜16 hours, cells were trypsinized, washed with PBS, and resuspended in PBS containing 1% FBS. Cells were filtered through a 70 uM Flowmi Tip Strainer (Bel-Art). Approximately 10% of cells were transferred into a collection tube containing 500 uls of PBS with 1% FBS as the unsorted control. Cells into which Cas9-eGFP was delivered were sorted based on GFP signal using a Becton Dickinson Aria II cell sorter. Cells were sorted into three populations consisting of the cells with the top ˜20% of signal, the mid ˜80-60% of signal, and the bottom ˜60% of signal. Total editing in cells 48-72 hours after delivery was measured by NGS and results are shown in FIG. 6. The highest signal cell populations had significantly higher editing than the unsorted cell population, indicating that Cas9-eGFP fusions fused with rigid linkers is suitable for this application.

### Example 7

Evaluation of Chimeric LbCas12a Protein Variants with eGFP Protein

[0091] To determine whether rigid linkers increase editing efficiency in the context of another RNA guided endonuclease, the LbCas12a protein variant (E795L) (SEQ ID NO: 310) was fused to eGFP (SEQ ID NO: 4) using either no linker (chimeric LbCas12a (E795L)-eGFP protein; SEQ ID NO: 314) or a subset of the linkers listed in Table I was expressed in E coli and purified. RNP complex was formed by incubating untagged or chimeric LbCas12a (E795L) proteins with ALT-R® LbCas12a crRNA (see Table IV) in PBS in a 1:1.2 ratio for 10 min and then delivered into HEK293 cells at a final concentration of 50 nM along with 3 micromolar ALT-R® Cas12a Electroporation Enhancer. Editing 48 hours after delivery was measured by NGS and the results are shown in FIG. 7. An increase in editing activity was observed for linker variants containing the (AP)₇A (SEQ ID NO: 16) and (AP)₉A (SEQ ID NO: 18) linkers compared to no linker or the other linkers tested. These are the same linkers that were observed to provide a benefit to editing in the context of chimeric Cas9-GFP proteins.

TABLE IV
Guide RNAs used in combination with LbCas12a
protein variant (E795L) chimeras.

| SEQ ID NO: | Protospacer sequence | Guide Name |
|---|---|---|
| 333 | ACACACCCAAGGAAAGACTAT | Cpf1 HPRT 38115-AS |
| 334 | TAATGCCCTGTAGTCTCTCTG | Cpf1 HPRT 38186-S |
| 335 | GGTTAAAGATGGTTAAATGAT | Cpf1 HPRT 38330-AS |
| 336 | TTGTAGGATATGCCCTTGACT | Cpf1 HPRT 38486-S |

### Example 8

### Exemplary Sequences of Cas Proteins and Nucleic Acids

[0092] The wild-type Cas9 protein amino acid sequence is presented as SEQ ID NO: 1. Polynucleotides codon-optimized for expression in E. coli and human cells are presented in SEQ ID NOs.: 337 and 338, respectively. Exemplary variants of Cas9 protein, the polynucleotides encoding them, as well as exemplary guide RNAs are disclosed in U.S. patent application Ser. Nos. 15/729,491 and 15/964,041, filed Oct. 10, 2017 and Apr. 26, 2018, respectively (Attorney Docket Nos. IDT01-009-US and IDT01-009-US-CIP, respectively), the contents of which are incorporated by reference herein.

(Cas9 protein amino acid sequence)
SEQ ID NO: 1
MDKKYSIGLDIGTNSVGWAVITDEYKVPSKKFKVLGNTDRHSIKKNLIGALLFDSGETAEATRLKRTARRRYTRRKN
RICYLQEIFSNEMAKVDDSFFHRLEESFLVEEDKKHERHPIFGNIVDEVAYHEKYPTIYHLRKKLVDSTDKADLRLI
YLALAHMIKFRGHFLIEGDLNPDNSDVDKLFIQLVQTYNQLFEENPINASGVDAKAILSARLSKSRRLENLIAQLPG
EKKNGLEGNLIALSLGLTPNEKSNEDLAEDAKLQLSKDTYDDDLDNLLAQIGDQYADLFLAAKNLSDAILLSDILRV
NTEITKAPLSASMIKRYDEHHQDLTLLKALVRQQLPEKYKEIFFDQSKNGYAGYIDGGASQEEFYKFIKPILEKMDG
TEELLVKLNREDLLRKQRTFDNGSIPHQIHLGELHAILRRQEDFYPFLKDNREKIEKILTFRIPYYVGPLARGNSRF
AWMTRKSEETITPWNFEEVVDKGASAQSFIERMTNEDKNLPNEKVLPKHSLLYEYFTVYNELTKVKYVTEGMRKPAF
LSGEQKKAIVDLLFKTNRKVTVKQLKEDYFKKIECFDSVEISGVEDRFNASLGTYHDLLKIIKDKDFLDNEENEDIL
EDIVLTLTLFEDREMIEERLKTYAHLFDDKVMKQLKRRRYTGWGRLSRKLINGIRDKQSGKTILDFLKSDGFANRNF
MQLIHDDSLTFKEDIQKAQVSGQGDSLHEHIANLAGSPAIKKGILQTVKVVDELVKVMGRHKPENIVIEMARENQTT
QKGQKNSRERMKRIEEGIKELGSQILKEHPVENTQLQNEKLYLYYLQNGRDMYVDQELDINRLSDYDVDHIVPQSFL
KDDSIDNKVLTRSDKNRGKSDNVPSEEVVKKMKNYWRQLLNAKLITQRKFDNLTKAERGGLSELDKAGFIKRQLVET
RQITKHVAQILDSRMNTKYDENDKLIREVKVITLKSKLVSDERKDFQFYKVREINNYHHAHDAYLNAVVGTALIKKY
PKLESEFVYGDYKVYDVRKMIAKSEQEIGKATAKYFFYSNIMNFFKTEITLANGEIRKRPLIETNGETGEIVWDKGR
DFATVRKVLSMPQVNIVKKTEVQTGGFSKESILPKRNSDKLIARKKDWDPKKYGGEDSPTVAYSVLVVAKVEKGKSK
KLKSVKELLGITIMERSSFEKNPIDFLEAKGYKEVKKDLIIKLPKYSLFELENGRKRMLASAGELQKGNELALPSKY
VNFLYLASHYEKLKGSPEDNEQKQLFVEQHKHYLDEIIEQISEFSKRVILADANLDKVLSAYNKHRDKPIREQAENI
IHLFTLTNLGAPAAFKYFDTTIDRKRYTSTKEVLDATLIHQSITGLYETRIDLSQLGGD
(Cas9 DNA sequence, codon-optimized for E. coli)
SEQ ID NO: 337
ATGGGCAGCAGCGCCCCAAAGAAGAAGCGGAAGGTCGGTATCCACGGAGTCCCAGCAGCCATGGACAAAAAGTACTC
TATTGGCCTGGATATCGGGACCAACAGCGTCGGGTGGGCTGTTATCACCGACGAGTATAAAGTACCTTCGAAAAAGT
TCAAAGTGCTGGGCAACACCGATCGCCATTCAATCAAAAAGAACTTGATTGGTGCGCTGTTGTTTGACTCCGGGGAA
ACCGCCGAGGCGACTCGCCTTAAACGTACAGCACGTCGCCGGTACACTCGGCGTAAGAATCGCATTTGCTATTTGCA
GGAAATCTTTAGCAACGAGATGGCAAAAGTCGATGACTCGTTTTTCCACCGCCTCGAGGAAAGCTTTCTGGTGGAGG
AAGACAAAAAGCATGAGCGTCACCCGATCTTCGGCAACATTGTCGATGAAGTAGCGTATCATGAAAAATACCCAACC
ATTTACCACTTACGCAAAAAGCTGGTGGACAGCACTGACAAAGCTGATTTGCGCCTTATCTATTTAGCCCTGGCACA
TATGATTAAGTTTCGTGGTCACTTCCTGATCGAAGGAGACTTAAATCCCGACAACAGTGATGTTGATAAATTGTTTA
TTCAGCTTGTCCAAACTTACAATCAACTGTTCGAGGAAAACCCGATCAATGCCTCCGGTGTGGATGCAAAAGCCATT
TTAAGTGCACGCCTTAGCAAGTCCCGTCGCTTAGAAAACCTTATCGCGCAGCTGCCCGGCGAGAAAAAGAATGGTTT
GTTTGGGAACCTTATTGCCTTGAGCTTAGGCCTCACCCCGAATTTCAAAAGTAATTTCGATCTTGCAGAAGACGCCA
AATTACAACTGTCGAAGGATACTTATGATGACGATCTCGATAATCTGTTAGCGCAGATTGGTGACCAATACGCCGAT
CTTTTTCTGGCGGCTAAAAATCTGAGCGACGCCATCTTGCTTTCGGATATTCTCCGCGTTAACACCGAAATCACGAA
AGCGCCTCTTAGTGCCAGCATGATTAAACGTTATGATGAACACCACCAGGACCTGACCTTACTCAAAGCGTTGGTTC
GCCAGCAACTGCCAGAGAAGTACAAAGAAATCTTCTTTGATCAGTCAAAGAATGGTTATGCCGGCTATATTGACGGG
GGTGCAAGCCAAGAGGAATTCTACAAATTTATCAAGCCTATTCTGGAGAAAATGGATGGCACCGAAGAGTTATTGGT
GAAGCTTAACCGTGAAGACCTCCTGCGGAAACAGCGCACATTCGATAATGGTTCGATCCCACACCAAATCCATTTGG
GGGAGTTACACGCTATTTTGCGTCGCCAGGAAGACTTTTACCCTTTCCTGAAGGATAACCGGGAGAAAATTGAGAAG
ATCCTTACCTTTCGTATTCCGTATTACGTAGGCCCCTTAGCACGGGGTAATAGCCGTTTCGCGTGGATGACACGGAA
GTCGGAAGAGACGATCACCCCGTGGAACTTCGAAGAGGTAGTCGACAAGGGCGCATCAGCGCAGTCTTTTATTGAAC
GTATGACGAATTTCGATAAAAACTTGCCCAATGAGAAGGTGCTTCCGAAACATTCCTTGTTATATGAATATTTTACA
GTTTACAACGAGCTGACCAAGGTTAAATACGTGACGGAAGGAATGCGCAAGCCCGCTTTTCTTAGCGGTGAGCAAAA
AAAGGCGATCGTCGACCTGTTATTCAAAACGAATCGTAAGGTGACTGTAAAGCAACTCAAAGAAGATTACTTCAAAA
AGATTGAGTGCTTCGACAGCGTCGAAATCTCTGGGGTAGAGGATCGGTTTAACGCAAGTTTAGGTACCTACCATGAC
CTGCTTAAAATCATTAAGGATAAAGACTTCTTAGATAATGAAGAGAACGAAGATATTCTCGAGGACATCGTCTTGAC
GTTAACCTTATTTGAGGATCGTGAAATGATTGAGGAACGCCTCAAAACTTATGCCCACCTGTTCGACGATAAGGTGA
TGAAGCAGCTGAAACGTCGGCGCTACACAGGATGGGGCCGCTTGAGTCGCAAACTTATTAACGGAATCCGTGACAAG
CAATCCGGCAAAACGATTCTGGATTTCTTGAAGTCGGACGGATTTGCTAATCGCAACTTCATGCAGTTGATCCATGA
TGACTCCCTGACTTTTAAAGAGGATATTCAAAAGGCGCAGGTTAGTGGTCAAGGCGACAGCTTACACGAACACATCG
CAAATTTGGCTGGTTCGCCGGCCATTAAAAAGGGGATCCTCCAGACCGTGAAAGTTGTAGATGAGCTTGTTAAGGTC
ATGGGTCGTCATAAGCCCGAAAACATCGTGATTGAAATGGCGCGGGAGAATCAAACGACCCAGAAAGGACAAAAGAA
TAGCCGTGAACGGATGAAGCGGATCGAGGAAGGCATTAAAGAGCTGGGGTCTCAAATCTTGAAGGAACACCCTGTGG
AGAACACTCAGCTCCAAAATGAAAAACTTTACCTGTACTATTTGCAGAACGGACGCGATATGTACGTGGACCAAGAG
TTGGATATTAATCGGCTGAGTGACTACGACGTTGATCATATCGTCCCGCAGAGCTTCCTCAAAGACGATTCTATTGA
CAATAAGGTACTGACGCGCTCTGATAAAAACCGTGGTAAGTCGGACAACGTGCCCTCCGAAGAGGTTGTGAAAAAGA
TGAAAAATTATTGGCGCCAGCTTTTAAACGCGAAGCTGATCACACAACGTAAATTCGATAATTTGACCAAGGCTGAA
CGGGGTGGCCTGAGCGAGTTAGATAAGGCAGGATTTATTAAACGCCAGTTAGTGGAGACTCGTCAAATCACCAAACA
TGTCGCGCAGATTTTGGACAGCCGGATGAACACCAAGTACGATGAAAATGACAAACTGATCCGTGAGGTGAAAGTCA
TTACTCTGAAGTCCAAATTAGTTAGTGATTTCCGGAAGGACTTTCAATTCTACAAAGTCCGTGAAATTAATAACTAT
CATCACGCACATGACGCGTACCTGAATGCAGTGGTTGGGACCGCCCTTATCAAGAAATATCCTAAGCTGGAGTCGGA
GTTTGTCTATGGCGACTATAAGGTATACGATGTTCGCAAAATGATTGCGAAATCTGAGCAGGAGATCGGTAAGGCAA
CCGCAAAATATTTCTTTTACTCAAACATTATGAATTTCTTTAAGACAGAAATCACTCTGGCCAACGGGGAGATTCGC
AAACGTCCGTTGATCGAAACAAACGGCGAGACTGGCGAAATTGTTTGGGACAAAGGGCGTGATTTCGCGACGGTGCG
CAAGGTACTGAGCATGCCTCAAGTCAATATTGTTAAGAAAACCGAAGTGCAGACGGGCGGGTTTTCCAAGGAAAGCA
TCTTACCCAAACGTAATTCAGATAAACTTATTGCACGCAAAAAGGACTGGGATCCGAAAAAGTATGGAGGCTTCGAC
AGTCCAACCGTAGCCTACTCTGTTCTCGTTGTAGCGAAAGTAGAAAAGGGTAAATCCAAGAAACTGAAATCTGTCAA
GGAGTTGCTTGGAATCACCATTATGGAGCGTAGCTCCTTCGAGAAGAACCCGATTGACTTTCTGGAAGCCAAAGGAT
ATAAAGAGGTCAAGAAAGATCTTATCATTAAGCTGCCTAAGTATTCACTCTTCGAGCTGGAAAATGGTCGTAAACGC
ATGCTCGCTTCTGCCGGCGAGTTGCAGAAGGGCAATGAATTAGCACTTCCATCAAAGTACGTTAACTTCCTGTATTT
GGCCAGCCATTACGAGAAACTGAAGGGGTCTCCAGAGGACAACGAACAGAAACAATTATTTGTAGAGCAGCACAAGC
ATTATCTTGATGAAATCATTGAGCAAATTTCCGAATTCAGTAAACGCGTAATCCTGGCCGATGCAAACCTCGACAAG
GTGCTGAGCGCTTACAATAAGCATCGCGACAAACCTATCCGTGAGCAGGCTGAAAATATCATTCACCTGTTCACATT
AACGAACCTGGGCGCTCCGGCCGCTTTTAAATATTTCGACACGACAATCGACCGTAAGCGCTATACCAGTACGAAAG
AAGTGTTGGATGCGACCCTTATTCACCAGTCAATTACAGGATTATATGAGACCCGTATCGACCTTAGCCAATTAGGT
GGGGATGCGGCCCCGAAGAAAAAACGCAAAGTGGATCCGAAGAAAAAACGCAAAGTGGCGGCCGCACTCGAGCACCA
CCACCACCACCACTGA
(Cas9 DNA sequence, codon-optimized for H. sapiens)
SEQ ID NO: 338
ATGGGCAAGCCCATCCCTAACCCCCTGTTGGGGCTGGACAGCACCGCTCCCAAAAAGAAAAGGAAGGTGGGCATTCA
CGGCGTGCCTGCGGCCGACAAAAAGTACAGCATCGGCCTTGATATCGGCACCAATAGCGTGGGCTGGGCCGTTATCA
CAGACGAATACAAGGTACCCAGCAAGAAGTTCAAGGTGCTGGGGAATACAGACAGGCACTCTATCAAGAAAAACCTT
ATCGGGGCTCTGCTGTTTGACTCAGGCGAGACCGCCGAGGCCACCAGGTTGAAGAGGACCGCAAGGCGAAGGTACAC
CCGGAGGAAGAACAGGATCTGCTATCTGCAGGAGATCTTCAGCAACGAGATGGCCAAGGTGGACGACAGCTTCTTCC
ACAGGCTGGAGGAGAGCTTCCTTGTCGAGGAGGATAAGAAGCACGAACGACACCCCATCTTCGGCAACATAGTCGAC
GAGGTCGCTTATCACGAGAAGTACCCCACCATCTACCACCTGCGAAAGAAATTGGTGGATAGCACCGATAAAGCCGA
CTTGCGACTTATCTACTTGGCTCTGGCGCACATGATTAAGTTCAGGGGCCACTTCCTGATCGAGGGCGACCTTAACC
CCGACAACAGTGACGTAGACAAATTGTTCATCCAGCTTGTACAGACCTATAACCAGCTGTTCGAGGAAAACCCTATT
AACGCCAGCGGGGTGGATGCGAAGGCCATACTTAGCGCCAGGCTGAGCAAAAGCAGGCGCTTGGAGAACCTGATAGC
CCAGCTGCCCGGTGAAAAGAAGAACGGCCTCTTCGGTAATCTGATTGCCCTGAGCCTGGGCCTGACCCCCAACTTCA
AGAGCAACTTCGACCTGGCAGAAGATGCCAAGCTGCAGTTGAGTAAGGACACCTATGACGACGACTTGGACAATCTG
CTCGCCCAAATCGGCGACCAGTACGCTGACCTGTTCCTCGCCGCCAAGAACCTTTCTGACGCAATCCTGCTTAGCGA
TATCCTTAGGGTGAACACAGAGATCACCAAGGCCCCCCTGAGCGCCAGCATGATCAAGAGGTACGACGAGCACCATC
AGGACCTGACCCTTCTGAAGGCCCTGGTGAGGCAGCAACTGCCCGAGAAGTACAAGGAGATCTTTTTCGACCAGAGC
AAGAACGGCTACGCCGGCTACATCGACGGCGGAGCCAGCCAAGAGGAGTTCTACAAGTTCATCAAGCCCATCCTGGA
GAAGATGGATGGCACCGAGGAGCTGCTGGTGAAGCTGAACAGGGAAGATTTGCTCCGGAAGCAGAGGACCTTTGACA
ACGGTAGCATCCCCCACCAGATCCACCTGGGCGAGCTGCACGCAATACTGAGGCGACAGGAGGATTTCTACCCCTTC
CTCAAGGACAATAGGGAGAAAATCGAAAAGATTCTGACCTTCAGGATCCCCTACTACGTGGGCCCTCTTGCCAGGGG
CAACAGCCGATTCGCTTGGATGACAAGAAAGAGCGAGGAGACCATCACCCCCTGGAACTTCGAGGAAGTGGTGGACA
AAGGAGCAAGCGCGCAGTCTTTCATCGAACGGATGACCAATTTCGACAAAAACCTGCCTAACGAGAAGGTGCTGCCC
AAGCACAGCCTGCTTTACGAGTACTTCACCGTGTACAACGAGCTCACCAAGGTGAAATATGTGACCGAGGGCATGCG
AAAACCCGCTTTCCTGAGCGGCGAGCAGAAGAAGGCCATCGTGGACCTGCTGTTCAAGACCAACAGGAAGGTGACCG
TGAAGCAGCTGAAGGAGGACTACTTCAAGAAGATCGAGTGCTTTGATAGCGTGGAAATAAGCGGCGTGGAGGACAGG
TTCAACGCCAGCCTGGGCACCTACCACGACTTGTTGAAGATAATCAAAGACAAGGATTTCCTGGATAATGAGGAGAA
CGAGGATATACTCGAGGACATCGTGCTGACTTTGACCCTGTTTGAGGACCGAGAGATGATTGAAGAAAGGCTCAAAA
CCTACGCCCACCTGTTCGACGACAAAGTGATGAAACAACTGAAGAGACGAAGATACACCGGCTGGGGCAGACTGTCC
AGGAAGCTCATCAACGGCATTAGGGACAAGCAGAGCGGCAAGACCATCCTGGATTTCCTGAAGTCCGACGGCTTCGC
CAACCGAAACTTCATGCAGCTGATTCACGATGACAGCTTGACCTTCAAGGAGGACATCCAGAAGGCCCAGGTTAGCG
GCCAGGGCGACTCCCTGCACGAACATATTGCAAACCTGGCAGGCTCCCCTGCGATCAAGAAGGGCATACTGCAGACC
GTTAAGGTTGTGGACGAATTGGTCAAGGTCATGGGCAGGCACAAGCCCGAAAACATAGTTATAGAGATGGCCAGAGA
GAACCAGACCACCCAAAAGGGCCAGAAGAACAGCCGGGAGCGCATGAAAAGGATCGAGGAGGGTATCAAGGAACTCG
GAAGCCAGATCCTCAAAGAGCACCCCGTGGAGAATACCCAGCTCCAGAACGAGAAGCTGTACCTGTACTACCTGCAG
AACGGCAGGGACATGTACGTTGACCAGGAGTTGGACATCAACAGGCTTTCAGACTATGACGTGGATCACATAGTGCC
CCAGAGCTTTCTTAAAGACGATAGCATCGACAACAAGGTCCTGACCCGCTCCGACAAAAACAGGGGCAAAAGCGACA
ACGTGCCAAGCGAAGAGGTGGTTAAAAAGATGAAGAACTACTGGAGGCAACTGCTCAACGCGAAATTGATCACCCAG
AGAAAGTTCGATAACCTGACCAAGGCCGAGAGGGGCGGACTCTCCGAACTTGACAAAGCGGGCTTCATAAAGAGGCA
GCTGGTCGAGACCCGACAGATCACGAAGCACGTGGCCCAAATCCTCGACAGCAGAATGAATACCAAGTACGATGAGA
ATGACAAACTCATCAGGGAAGTGAAAGTGATTACCCTGAAGAGCAAGTTGGTGTCCGACTTTCGCAAAGATTTCCAG
TTCTACAAGGTGAGGGAGATCAACAACTACCACCATGCCCACGACGCATACCTGAACGCCGTGGTCGGCACCGCCCT
GATTAAGAAGTATCCAAAGCTGGAGTCCGAATTTGTCTACGGCGACTACAAAGTTTACGATGTGAGGAAGATGATCG
CTAAGAGCGAACAGGAGATCGGCAAGGCCACCGCTAAGTATTTCTTCTACAGCAACATCATGAACTTTTTCAAGACC
GAGATCACACTTGCCAACGGCGAAATCAGGAAGAGGCCGCTTATCGAGACCAACGGTGAGACCGGCGAGATCGTGTG
GGACAAGGGCAGGGACTTCGCCACCGTGAGGAAAGTCCTGAGCATGCCCCAGGTGAATATTGTGAAAAAAACTGAGG
TGCAGACAGGCGGCTTTAGCAAGGAATCCATCCTGCCCAAGAGGAACAGCGACAAGCTGATCGCCCGGAAGAAGGAC
TGGGACCCTAAGAAGTATGGAGGCTTCGACAGCCCCACCGTAGCCTACAGCGTGCTGGTGGTCGCGAAGGTAGAGAA
GGGGAAGAGCAAGAAACTGAAGAGCGTGAAGGAGCTGCTCGGCATAACCATCATGGAGAGGTCCAGCTTTGAGAAGA
ACCCCATTGACTTTTTGGAAGCCAAGGGCTACAAAGAGGTCAAAAAGGACCTGATCATCAAACTCCCCAAGTACTCC
CTGTTTGAATTGGAGAACGGCAGAAAGAGGATGCTGGCGAGCGCTGGGGAACTGCAAAAGGGCAACGAACTGGCGCT
GCCCAGCAAGTACGTGAATTTTCTGTACCTGGCGTCCCACTACGAAAAGCTGAAAGGCAGCCCCGAGGACAACGAGC
AGAAGCAGCTGTTCGTGGAGCAGCACAAGCATTACCTGGACGAGATAATCGAGCAAATCAGCGAGTTCAGCAAGAGG
GTGATTCTGGCCGACGCGAACCTGGATAAGGTCCTCAGCGCCTACAACAAGCACCGAGACAAACCCATCAGGGAGCA
GGCCGAGAATATCATACACCTGTTCACCCTGACAAATCTGGGCGCACCTGCGGCATTCAAATACTTCGATACCACCA
TCGACAGGAAAAGGTACACTAGCACTAAGGAGGTGCTGGATGCCACCTTGATCCACCAGTCCATTACCGGCCTGTAT
GAGACCAGGATCGACCTGAGCCAGCTTGGAGGCGACTCTAGGGCGGACCCAAAAAAGAAAAGGAAGGTGGAATTCCA
CCACACTGGACTAGTGGATCCGAGCTCGGTACCAAGCTTAAGTTTAAACCGCTGA

[0093] The wild-type AsCas12a protein amino acid sequence is presented as SEQ ID NO: 2. Polynucleotides codon-optimized for expression in E. coli and human cells are presented as SEQ ID NOs.: 339 and 340, respectively. Exemplary variants of AsCas12a protein, the polynucleotides encoding them, as well as exemplary guide RNAs are disclosed in U.S. patent application Ser. No. 16/536,256, filed Aug. 8, 2019, (Attorney Docket No. IDT01-013-US), the contents of which are incorporated by reference herein.

(AsCas12a protein amino acid sequence)
SEQ ID NO: 2
MTQFEGFTNLYQVSKTLRFELIPQGKTLKHIQEQGFIEEDKARNDHYKELKPIIDRIYKTYADQCLQLVQLDWENLS
AAIDSYRKEKTEETRNALIEEQATYRNAIHDYFIGRTDNLTDAINKRHAEIYKGLFKAELFNGKVLKQLGTVTTTEH
ENALLRSFDKETTYFSGEYENRKNVESAEDISTAIPHRIVQDNFPKFKENCHIFTRLITAVPSLREHFENVKKAIGI
FVSTSIEEVFSFPFYNQLLTQTQIDLYNQLLGGISREAGTEKIKGLNEVLNLAIQKNDETAHIIASLPHRFIPLFKQ
ILSDRNTLSFILEEFKSDEEVIQSFCKYKTLLRNENVLETAEALFNELNSIDLTHIFISHKKLETISSALCDHWDTL
RNALYERRISELTGKITKSAKEKVQRSLKHEDINLQEIISAAGKELSEAFKQKTSEILSHAHAALDQPLPTTLKKQE
EKEILKSQLDSLLGLYHLLDWFAVDESNEVDPEFSARLTGIKLEMEPSLSFYNKARNYATKKPYSVEKFKLNFQMPT
LASGWDVNKEKNNGAILFVKNGLYYLGIMPKQKGRYKALSFEPTEKTSEGFDKMYYDYFPDAAKMIPKCSTQLKAVT
AHFQTHTTPILLSNNFIEPLEITKEIYDLNNPEKEPKKFQTAYAKKTGDQKGYREALCKWIDETRDELSKYTKTTSI
DLSSLRPSSQYKDLGEYYAELNPLLYHISFQRIAEKEIMDAVETGKLYLFQIYNKDFAKGHHGKPNLHTLYWTGLFS
PENLAKTSIKLNGQAELFYRPKSRMKRMAHRLGEKMLNKKLKDQKTPIPDTLYQELYDYVNHRLSHDLSDEARALLP
NVITKEVSHEIIKDRRFTSDKEFFHVPITLNYQAANSPSKFNQRVNAYLKEHPETPIIGIDRGERNLIYITVIDSTG
KILEQRSLNTIQQFDYQKKLDNREKERVAARQAWSVVGTIKDLKQGYLSQVIHEIVDLMIHYQAVVVLENLNEGEKS
KRTGIAEKAVYQQFEKMLIDKLNCLVLKDYPAEKVGGVLNPYQLTDQFTSFAKMGTQSGELFYVPAPYTSKIDPLTG
FVDPFVWKTIKNHESRKHFLEGFDFLHYDVKTGDFILHFKMNRNLSFQRGLPGEMPAWDIVFEKNETQFDAKGTPFI
AGKRIVPVIENHRFTGRYRDLYPANELIALLEEKGIVERDGSNILPKLLENDDSHAIDTMVALIRSVLQMRNSNAAT
GEDYINSPVRDLNGVCEDSREQNPEWPMDADANGAYHIALKGQLLLNHLKESKDLKLQNGISNQDWLAYIQELRN
(AsCas12a DNA sequence, codon-optimized for E. coli)
SEQ ID NO: 339
ATGACCCAGTTTGAAGGTTTCACCAATCTGTATCAGGTTAGCAAAACCCTGCGTTTTGAACTGATTCCGCAGGGTAA
AACCCTGAAACATATTCAAGAACAGGGCTTCATCGAAGAGGATAAAGCACGTAACGATCACTACAAAGAACTGAAAC
CGATTATCGACCGCATCTATAAAACCTATGCAGATCAGTGTCTGCAGCTGGTTCAGCTGGATTGGGAAAATCTGAGC
GCAGCAATTGATAGTTATCGCAAAGAAAAAACCGAAGAAACCCGTAATGCACTGATTGAAGAACAGGCAACCTATCG
TAATGCCATCCATGATTATTTCATTGGTCGTACCGATAATCTGACCGATGCAATTAACAAACGTCACGCCGAAATCT
ATAAAGGCCTGTTTAAAGCCGAACTGTTTAATGGCAAAGTTCTGAAACAGCTGGGCACCGTTACCACCACCGAACAT
GAAAATGCACTGCTGCGTAGCTTTGATAAATTCACCACCTATTTCAGCGGCTTTTATGAGAATCGCAAAAACGTGTT
TAGCGCAGAAGATATTAGCACCGCAATTCCGCATCGTATTGTGCAGGATAATTTCCCGAAATTCAAAGAGAACTGCC
ACATTTTTACCCGTCTGATTACCGCAGTTCCGAGCCTGCGTGAACATTTTGAAAACGTTAAAAAAGCCATCGGCATC
TTTGTTAGCACCAGCATTGAAGAAGTTTTTAGCTTCCCGTTTTACAATCAGCTGCTGACCCAGACCCAGATTGATCT
GTATAACCAACTGCTGGGTGGTATTAGCCGTGAAGCAGGCACCGAAAAAATCAAAGGTCTGAATGAAGTGCTGAATC
TGGCCATTCAGAAAAATGATGAAACCGCACATATTATTGCAAGCCTGCCGCATCGTTTTATTCCGCTGTTCAAACAA
ATTCTGAGCGATCGTAATACCCTGAGCTTTATTCTGGAAGAATTCAAATCCGATGAAGAGGTGATTCAGAGCTTTTG
CAAATACAAAACGCTGCTGCGCAATGAAAATGTTCTGGAAACTGCCGAAGCACTGTTTAACGAACTGAATAGCATTG
ATCTGACCCACATCTTTATCAGCCACAAAAAACTGGAAACCATTTCAAGCGCACTGTGTGATCATTGGGATACCCTG
CGTAATGCCCTGTATGAACGTCGTATTAGCGAACTGACCGGTAAAATTACCAAAAGCGCGAAAGAAAAAGTTCAGCG
CAGTCTGAAACATGAGGATATTAATCTGCAAGAGATTATTAGCGCAGCCGGTAAAGAACTGTCAGAAGCATTTAAAC
AGAAAACCAGCGAAATTCTGTCACATGCACATGCAGCACTGGATCAGCCGCTGCCGACCACCCTGAAAAAACAAGAA
GAAAAAGAAATCCTGAAAAGCCAGCTGGATAGCCTGCTGGGTCTGTATCATCTGCTGGACTGGTTTGCAGTTGATGA
AAGCAATGAAGTTGATCCGGAATTTAGCGCACGTCTGACCGGCATTAAACTGGAAATGGAACCGAGCCTGAGCTTTT
ATAACAAAGCCCGTAATTATGCCACCAAAAAACCGTATAGCGTCGAAAAATTCAAACTGAACTTTCAGATGCCGACC
CTGGCAAGCGGTTGGGATGTTAATAAAGAAAAAAACAACGGTGCCATCCTGTTCGTGAAAAATGGCCTGTATTATCT
GGGTATTATGCCGAAACAGAAAGGTCGTTATAAAGCGCTGAGCTTTGAACCGACGGAAAAAACCAGTGAAGGTTTTG
ATAAAATGTACTACGACTATTTTCCGGATGCAGCCAAAATGATTCCGAAATGTAGCACCCAGCTGAAAGCAGTTACC
GCACATTTTCAGACCCATACCACCCCGATTCTGCTGAGCAATAACTTTATTGAACCGCTGGAAATCACCAAAGAGAT
CTACGATCTGAATAACCCGGAAAAAGAGCCGAAAAAATTCCAGACCGCATATGCAAAAAAAACCGGTGATCAGAAAG
GTTATCGTGAAGCGCTGTGTAAATGGATTGATTTCACCCGTGATTTTCTGAGCAAATACACCAAAACCACCAGTATC
GATCTGAGCAGCCTGCGTCCGAGCAGCCAGTATAAAGATCTGGGCGAATATTATGCAGAACTGAATCCGCTGCTGTA
TCATATTAGCTTTCAGCGTATTGCCGAGAAAGAAATCATGGACGCAGTTGAAACCGGTAAACTGTACCTGTTCCAGA
TCTACAATAAAGATTTTGCCAAAGGCCATCATGGCAAACCGAATCTGCATACCCTGTATTGGACCGGTCTGTTTAGC
CCTGAAAATCTGGCAAAAACCTCGATTAAACTGAATGGTCAGGCGGAACTGTTTTATCGTCCGAAAAGCCGTATGAA
ACGTATGGCACATCGTCTGGGTGAAAAAATGCTGAACAAAAAACTGAAAGACCAGAAAACCCCGATCCCGGATACAC
TGTATCAAGAACTGTATGATTATGTGAACCATCGTCTGAGCCATGATCTGAGTGATGAAGCACGTGCCCTGCTGCCG
AATGTTATTACCAAAGAAGTTAGCCACGAGATCATTAAAGATCGTCGTTTTACCAGCGACAAATTCTTTTTTCATGT
GCCGATTACCCTGAATTATCAGGCAGCAAATAGCCCGAGCAAATTTAACCAGCGTGTTAATGCATATCTGAAAGAAC
ATCCAGAAACGCCGATTATTGGTATTGATCGTGGTGAACGTAACCTGATTTATATCACCGTTATTGATAGCACCGGC
AAAATCCTGGAACAGCGTAGCCTGAATACCATTCAGCAGTTTGATTACCAGAAAAAACTGGATAATCGCGAGAAAGA
ACGTGTTGCAGCACGTCAGGCATGGTCAGTTGTTGGTACAATTAAAGACCTGAAACAGGGTTATCTGAGCCAGGTTA
TTCATGAAATTGTGGATCTGATGATTCACTATCAGGCCGTTGTTGTGCTGGAAAACCTGAATTTTGGCTTTAAAAGC
AAACGTACCGGCATTGCAGAAAAAGCAGTTTATCAGCAGTTCGAGAAAATGCTGATTGACAAACTGAATTGCCTGGT
GCTGAAAGATTATCCGGCTGAAAAAGTTGGTGGTGTTCTGAATCCGTATCAGCTGACCGATCAGTTTACCAGCTTTG
CAAAAATGGGCACCCAGAGCGGATTTCTGTTTTATGTTCCGGCACCGTATACGAGCAAAATTGATCCGCTGACCGGT
TTTGTTGATCCGTTTGTTTGGAAAACCATCAAAAACCATGAAAGCCGCAAACATTTTCTGGAAGGTTTCGATTTTCT
GCATTACGACGTTAAAACGGGTGATTTCATCCTGCACTTTAAAATGAATCGCAATCTGAGTTTTCAGCGTGGCCTGC
CTGGTTTTATGCCTGCATGGGATATTGTGTTTGAGAAAAACGAAACACAGTTCGATGCAAAAGGCACCCCGTTTATT
GCAGGTAAACGTATTGTTCCGGTGATTGAAAATCATCGTTTCACCGGTCGTTATCGCGATCTGTATCCGGCAAATGA
ACTGATCGCACTGCTGGAAGAGAAAGGTATTGTTTTTCGTGATGGCTCAAACATTCTGCCGAAACTGCTGGAAAATG
ATGATAGCCATGCAATTGATACCATGGTTGCACTGATTCGTAGCGTTCTGCAGATGCGTAATAGCAATGCAGCAACC
GGTGAAGATTACATTAATAGTCCGGTTCGTGATCTGAATGGTGTTTGTTTTGATAGCCGTTTTCAGAATCCGGAATG
GCCGATGGATGCAGATGCAAATGGTGCATATCATATTGCACTGAAAGGACAGCTGCTGCTGAACCACCTGAAAGAAA
GCAAAGATCTGAAACTGCAAAACGGCATTAGCAATCAGGATTGGCTGGCATATATCCAAGAACTGCGTAAC
(AsCas12a DNA sequence, codon-optimized for H. sapiens)
SEQ ID NO: 340
ATGACCCAGTTTGAAGGTTTCACCAATCTGTATCAGGTTAGCAAAACCCTGCGTTTTGAACTGATTCCGCAGGGTAA
AACCCTGAAACATATTCAAGAACAGGGCTTCATCGAAGAGGATAAAGCACGTAACGATCACTACAAAGAACTGAAAC
CGATTATCGACCGCATCTATAAAACCTATGCAGATCAGTGTCTGCAGCTGGTTCAGCTGGATTGGGAAAATCTGAGC
GCAGCAATTGATAGTTATCGCAAAGAAAAAACCGAAGAAACCCGTAATGCACTGATTGAAGAACAGGCAACCTATCG
TAATGCCATCCATGATTATTTCATTGGTCGTACCGATAATCTGACCGATGCAATTAACAAACGTCACGCCGAAATCT
ATAAAGGCCTGTTTAAAGCCGAACTGTTTAATGGCAAAGTTCTGAAACAGCTGGGCACCGTTACCACCACCGAACAT
GAAAATGCACTGCTGCGTAGCTTTGATAAATTCACCACCTATTTCAGCGGCTTTTATGAGAATCGCAAAAACGTGTT
TAGCGCAGAAGATATTAGCACCGCAATTCCGCATCGTATTGTGCAGGATAATTTCCCGAAATTCAAAGAGAACTGCC
ACATTTTTACCCGTCTGATTACCGCAGTTCCGAGCCTGCGTGAACATTTTGAAAACGTTAAAAAAGCCATCGGCATC
TTTGTTAGCACCAGCATTGAAGAAGTTTTTAGCTTCCCGTTTTACAATCAGCTGCTGACCCAGACCCAGATTGATCT
GTATAACCAACTGCTGGGTGGTATTAGCCGTGAAGCAGGCACCGAAAAAATCAAAGGTCTGAATGAAGTGCTGAATC
TGGCCATTCAGAAAAATGATGAAACCGCACATATTATTGCAAGCCTGCCGCATCGTTTTATTCCGCTGTTCAAACAA
ATTCTGAGCGATCGTAATACCCTGAGCTTTATTCTGGAAGAATTCAAATCCGATGAAGAGGTGATTCAGAGCTTTTG
CAAATACAAAACGCTGCTGCGCAATGAAAATGTTCTGGAAACTGCCGAAGCACTGTTTAACGAACTGAATAGCATTG
ATCTGACCCACATCTTTATCAGCCACAAAAAACTGGAAACCATTTCAAGCGCACTGTGTGATCATTGGGATACCCTG
CGTAATGCCCTGTATGAACGTCGTATTAGCGAACTGACCGGTAAAATTACCAAAAGCGCGAAAGAAAAAGTTCAGCG
CAGTCTGAAACATGAGGATATTAATCTGCAAGAGATTATTAGCGCAGCCGGTAAAGAACTGTCAGAAGCATTTAAAC
AGAAAACCAGCGAAATTCTGTCACATGCACATGCAGCACTGGATCAGCCGCTGCCGACCACCCTGAAAAAACAAGAA
GAAAAAGAAATCCTGAAAAGCCAGCTGGATAGCCTGCTGGGTCTGTATCATCTGCTGGACTGGTTTGCAGTTGATGA
AAGCAATGAAGTTGATCCGGAATTTAGCGCACGTCTGACCGGCATTAAACTGGAAATGGAACCGAGCCTGAGCTTTT
ATAACAAAGCCCGTAATTATGCCACCAAAAAACCGTATAGCGTCGAAAAATTCAAACTGAACTTTCAGATGCCGACC
CTGGCAAGCGGTTGGGATGTTAATAAAGAAAAAAACAACGGTGCCATCCTGTTCGTGAAAAATGGCCTGTATTATCT
GGGTATTATGCCGAAACAGAAAGGTCGTTATAAAGCGCTGAGCTTTGAACCGACGGAAAAAACCAGTGAAGGTTTTG
ATAAAATGTACTACGACTATTTTCCGGATGCAGCCAAAATGATTCCGAAATGTAGCACCCAGCTGAAAGCAGTTACC
GCACATTTTCAGACCCATACCACCCCGATTCTGCTGAGCAATAACTTTATTGAACCGCTGGAAATCACCAAAGAGAT
CTACGATCTGAATAACCCGGAAAAAGAGCCGAAAAAATTCCAGACCGCATATGCAAAAAAAACCGGTGATCAGAAAG
GTTATCGTGAAGCGCTGTGTAAATGGATTGATTTCACCCGTGATTTTCTGAGCAAATACACCAAAACCACCAGTATC
GATCTGAGCAGCCTGCGTCCGAGCAGCCAGTATAAAGATCTGGGCGAATATTATGCAGAACTGAATCCGCTGCTGTA
TCATATTAGCTTTCAGCGTATTGCCGAGAAAGAAATCATGGACGCAGTTGAAACCGGTAAACTGTACCTGTTCCAGA
TCTACAATAAAGATTTTGCCAAAGGCCATCATGGCAAACCGAATCTGCATACCCTGTATTGGACCGGTCTGTTTAGC
CCTGAAAATCTGGCAAAAACCTCGATTAAACTGAATGGTCAGGCGGAACTGTTTTATCGTCCGAAAAGCCGTATGAA
ACGTATGGCACATCGTCTGGGTGAAAAAATGCTGAACAAAAAACTGAAAGACCAGAAAACCCCGATCCCGGATACAC
TGTATCAAGAACTGTATGATTATGTGAACCATCGTCTGAGCCATGATCTGAGTGATGAAGCACGTGCCCTGCTGCCG
AATGTTATTACCAAAGAAGTTAGCCACGAGATCATTAAAGATCGTCGTTTTACCAGCGACAAATTCTTTTTTCATGT
GCCGATTACCCTGAATTATCAGGCAGCAAATAGCCCGAGCAAATTTAACCAGCGTGTTAATGCATATCTGAAAGAAC
ATCCAGAAACGCCGATTATTGGTATTGATCGTGGTGAACGTAACCTGATTTATATCACCGTTATTGATAGCACCGGC
AAAATCCTGGAACAGCGTAGCCTGAATACCATTCAGCAGTTTGATTACCAGAAAAAACTGGATAATCGCGAGAAAGA
ACGTGTTGCAGCACGTCAGGCATGGTCAGTTGTTGGTACAATTAAAGACCTGAAACAGGGTTATCTGAGCCAGGTTA
TTCATGAAATTGTGGATCTGATGATTCACTATCAGGCCGTTGTTGTGCTGGAAAACCTGAATTTTGGCTTTAAAAGC
AAACGTACCGGCATTGCAGAAAAAGCAGTTTATCAGCAGTTCGAGAAAATGCTGATTGACAAACTGAATTGCCTGGT
GCTGAAAGATTATCCGGCTGAAAAAGTTGGTGGTGTTCTGAATCCGTATCAGCTGACCGATCAGTTTACCAGCTTTG
CAAAAATGGGCACCCAGAGCGGATTTCTGTTTTATGTTCCGGCACCGTATACGAGCAAAATTGATCCGCTGACCGGT
TTTGTTGATCCGTTTGTTTGGAAAACCATCAAAAACCATGAAAGCCGCAAACATTTTCTGGAAGGTTTCGATTTTCT
GCATTACGACGTTAAAACGGGTGATTTCATCCTGCACTTTAAAATGAATCGCAATCTGAGTTTTCAGCGTGGCCTGC
CTGGTTTTATGCCTGCATGGGATATTGTGTTTGAGAAAAACGAAACACAGTTCGATGCAAAAGGCACCCCGTTTATT
GCAGGTAAACGTATTGTTCCGGTGATTGAAAATCATCGTTTCACCGGTCGTTATCGCGATCTGTATCCGGCAAATGA
ACTGATCGCACTGCTGGAAGAGAAAGGTATTGTTTTTCGTGATGGCTCAAACATTCTGCCGAAACTGCTGGAAAATG
ATGATAGCCATGCAATTGATACCATGGTTGCACTGATTCGTAGCGTTCTGCAGATGCGTAATAGCAATGCAGCAACC
GGTGAAGATTACATTAATAGTCCGGTTCGTGATCTGAATGGTGTTTGTTTTGATAGCCGTTTTCAGAATCCGGAATG
GCCGATGGATGCAGATGCAAATGGTGCATATCATATTGCACTGAAAGGACAGCTGCTGCTGAACCACCTGAAAGAAA
GCAAAGATCTGAAACTGCAAAACGGCATTAGCAATCAGGATTGGCTGGCATATATCCAAGAACTGCGTAAC

[0094] The wild-type LbCas12a protein amino acid sequence is presented as SEQ ID NO: 3. Polynucleotides codon-optimized for expression in E. coli and human cells are presented in SEQ ID NOS: 341 and 342, respectively. Exemplary variants of LbCas12a protein, the polynucleotides encoding them, as well as exemplary guide RNAs are disclosed in U.S. Patent Application Ser. No. 63/018,592, filed May 1, 2020, (Attorney Docket No. IDT01-017-PRO), (now U.S. patent application Ser. No. 17/245,401, filed Apr. 30, 2021), the contents of which are incorporated by reference herein.

(LbCas12a protein amino acid sequence)
SEQ ID NO: 3
MSKLEKFTNCYSLSKTLRFKAIPVGKTQENIDNKRLLVEDEKRAEDYKGVKKLLDRYYLSFINDVLHSIKLKNLNNY
ISLFRKKTRTEKENKELENLEINLRKEIAKAFKGNEGYKSLFKKDIIETILPEFLDDKDEIALVNSENGETTAFTGE
FDNRENMESEEAKSTSIAFRCINENLTRYISNMDIFEKVDAIFDKHEVQEIKEKILNSDYDVEDFFEGEFFNFVLTQ
EGIDVYNAIIGGFVTESGEKIKGLNEYINLYNQKTKQKLPKFKPLYKQVLSDRESLSFYGEGYTSDEEVLEVFRNTL
NKNSEIFSSIKKLEKLFKNFDEYSSAGIFVKNGPAISTISKDIFGEWNVIRDKWNAEYDDIHLKKKAVVTEKYEDDR
RKSFKKIGSFSLEQLQEYADADLSVVEKLKEIIIQKVDEIYKVYGSSEKLFDADFVLEKSLKKNDAVVAIMKDLLDS
VKSFENYIKAFFGEGKETNRDESFYGDFVLAYDILLKVDHIYDAIRNYVTQKPYSKDKFKLYFQNPQFMGGWDKDKE
TDYRATILRYGSKYYLAIMDKKYAKCLQKIDKDDVNGNYEKINYKLLPGPNKMLPKVFFSKKWMAYYNPSEDIQKIY
KNGTFKKGDMFNLNDCHKLIDFFKDSISRYPKWSNAYDENFSETEKYKDIAGFYREVEEQGYKVSFESASKKEVDKL
VEEGKLYMFQIYNKDFSDKSHGTPNLHTMYFKLLFDENNHGQIRLSGGAELFMRRASLKKEELVVHPANSPIANKNP
DNPKKTTTLSYDVYKDKRFSEDQYELHIPIAINKCPKNIFKINTEVRVLLKHDDNPYVIGIDRGERNLLYIVVVDGK
GNIVEQYSLNEIINNENGIRIKTDYHSLLDKKEKERFEARQNWTSIENIKELKAGYISQVVHKICELVEKYDAVIAL
EDLNSGFKNSRVKVEKQVYQKFEKMLIDKLNYMVDKKSNPCATGGALKGYQITNKFESFKSMSTQNGFIFYIPAWLT
SKIDPSTGFVNLLKTKYTSIADSKKFISSFDRIMYVPEEDLFEFALDYKNFSRTDADYIKKWKLYSYGNRIRIFRNP
KKNNVFDWEEVCLTSAYKELFNKYGINYQQGDIRALLCEQSDKAFYSSFMALMSLMLQMRNSITGRTDVDFLISPVK
NSDGIFYDSRNYEAQENAILPKNADANGAYNIARKVLWAIGQFKKAEDEKLDKVKIAISNKEWLEYAQTSVKH
(LbCas12a DNA sequence, codon-optimized for E. coli)
SEQ ID NO: 341
ATGAGTAAGCTGGAGAAATTTACTAATTGTTACTCACTGTCAAAAACGCTGCGTTTCAAAGCGATCCCAGTGGGCAA
AACTCAAGAAAATATTGACAATAAACGTTTGCTTGTCGAAGACGAAAAGCGCGCCGAAGACTATAAGGGGGTGAAGA
AGCTTCTTGACCGTTACTACCTTTCATTCATCAACGATGTTCTGCACAGCATCAAGTTAAAAAACCTTAACAATTAC
ATTAGTTTGTTTCGCAAGAAGACACGTACAGAGAAAGAGAATAAAGAGCTTGAAAACTTAGAGATTAACCTTCGCAA
GGAGATCGCAAAGGCGTTCAAAGGCAATGAAGGCTATAAGTCGTTATTTAAAAAAGACATCATTGAAACGATTCTGC
CCGAGTTTTTGGATGATAAGGATGAAATCGCCTTAGTTAATTCGTTCAATGGGTTCACTACAGCCTTTACAGGATTC
TTTGATAACCGTGAAAACATGTTTAGCGAGGAAGCAAAAAGCACGAGCATTGCATTTCGCTGCATTAACGAAAATTT
GACTCGTTATATCTCTAACATGGACATCTTTGAGAAGGTTGACGCGATCTTCGATAAGCACGAAGTCCAGGAGATCA
AGGAGAAGATTCTGAACAGCGATTACGACGTTGAAGACTTTTTCGAGGGGGAATTTTTTAACTTTGTGCTTACGCAG
GAAGGAATCGATGTATATAATGCAATTATTGGTGGCTTCGTGACAGAGTCAGGTGAGAAGATTAAAGGATTAAATGA
ATATATCAATTTATACAATCAGAAGACCAAGCAGAAGCTTCCCAAGTTCAAGCCACTGTACAAGCAAGTGTTGTCCG
ACCGCGAGAGCCTTTCCTTTTACGGTGAAGGCTATACCAGTGACGAAGAGGTGTTAGAAGTCTTCCGTAACACGTTA
AACAAAAATTCCGAAATTTTCTCATCCATCAAAAAGCTGGAGAAATTATTTAAGAACTTCGACGAATACAGTAGTGC
AGGGATTTTTGTGAAAAATGGACCAGCTATCAGTACTATTTCTAAAGACATCTTCGGGGAATGGAATGTGATTCGCG
ATAAGTGGAATGCTGAGTATGATGATATTCATCTGAAGAAGAAGGCTGTCGTAACGGAGAAGTATGAGGACGATCGC
CGTAAGTCATTCAAAAAAATTGGCTCCTTCAGCCTTGAGCAGCTGCAGGAGTATGCTGATGCTGATCTGTCGGTTGT
CGAGAAGTTAAAAGAGATTATTATCCAAAAGGTAGACGAAATTTATAAGGTCTACGGGAGTAGCGAAAAGTTGTTTG
ATGCTGACTTCGTTTTAGAAAAAAGTTTGAAGAAGAATGATGCGGTCGTTGCCATTATGAAAGATTTGCTGGATAGT
GTTAAATCTTTCGAGAATTACATCAAAGCCTTTTTTGGTGAAGGGAAAGAGACTAATCGCGACGAGTCTTTCTACGG
AGATTTTGTGTTAGCGTACGATATCCTGTTGAAGGTAGACCACATCTATGACGCTATTCGCAATTATGTCACACAAA
AACCATATTCTAAGGACAAGTTCAAATTGTACTTTCAGAACCCCCAATTCATGGGCGGATGGGACAAGGATAAGGAA
ACAGACTACCGTGCGACGATTTTGCGCTACGGTAGCAAATACTACCTGGCTATCATGGACAAAAAGTACGCAAAATG
TTTACAGAAAATTGACAAGGATGACGTCAACGGTAACTATGAAAAAATCAATTACAAATTACTGCCTGGGCCAAATA
AGATGCTGCCAAAAGTGTTCTTTAGTAAGAAATGGATGGCCTACTATAATCCGTCTGAGGACATCCAAAAAATCTAC
AAAAACGGCACGTTCAAGAAGGGAGATATGTTCAATTTAAACGATTGTCACAAATTAATCGATTTTTTTAAAGATTC
CATTTCCCGTTATCCAAAGTGGTCCAATGCATATGACTTCAACTTTAGCGAGACCGAGAAATACAAGGATATCGCCG
GATTCTATCGTGAGGTGGAGGAACAAGGTTACAAGGTCTCCTTTGAGTCAGCCTCTAAAAAGGAGGTTGATAAATTG
GTGGAGGAGGGCAAATTGTATATGTTCCAAATTTACAACAAAGACTTCTCTGACAAGAGTCATGGCACTCCTAACTT
GCACACTATGTATTTCAAATTGTTATTTGATGAAAATAATCATGGTCAAATCCGTTTGTCAGGCGGTGCAGAATTGT
TCATGCGTCGCGCTAGCTTAAAGAAGGAGGAGTTAGTAGTACACCCGGCTAACAGTCCGATCGCTAACAAAAACCCG
GACAATCCCAAAAAAACAACTACGCTGAGTTACGACGTGTATAAAGATAAACGCTTCTCAGAGGACCAATATGAACT
GCATATCCCCATCGCCATCAATAAGTGCCCCAAGAACATTTTCAAGATCAATACGGAAGTACGCGTCCTGTTGAAGC
ACGATGATAACCCGTACGTCATTGGTATCGACCGCGGTGAACGCAATTTACTTTATATCGTCGTAGTGGACGGTAAA
GGCAACATTGTAGAGCAATATTCCTTAAACGAGATCATCAATAATTTTAACGGCATCCGCATTAAAACAGATTACCA
CTCTCTGCTGGATAAAAAAGAGAAAGAGCGTTTCGAAGCTCGTCAGAATTGGACCTCCATCGAGAATATCAAAGAGC
TTAAAGCGGGGTACATTTCACAGGTGGTGCATAAGATTTGCGAGTTGGTAGAAAAATACGACGCCGTAATCGCATTG
GAGGATCTGAATTCGGGTTTCAAAAACAGCCGTGTTAAGGTTGAAAAACAAGTCTATCAAAAATTCGAAAAGATGTT
AATTGACAAATTGAACTATATGGTTGATAAAAAGTCGAATCCATGTGCGACAGGGGGGGCATTAAAGGGATATCAGA
TTACTAATAAATTCGAATCGTTCAAGAGCATGAGCACTCAAAATGGCTTCATCTTTTACATCCCAGCATGGCTGACC
TCGAAAATTGATCCTTCCACAGGTTTCGTCAACCTTTTGAAGACTAAGTATACTAGTATTGCGGACTCGAAGAAGTT
CATCAGTTCTTTCGACCGTATTATGTATGTGCCGGAGGAGGATCTGTTTGAGTTCGCATTGGATTATAAGAATTTCA
GCCGCACCGACGCGGACTACATTAAAAAATGGAAATTATACTCATACGGAAATCGCATTCGTATCTTTCGTAATCCC
AAAAAGAACAATGTTTTCGACTGGGAGGAAGTGTGCCTTACTTCGGCGTATAAGGAGCTTTTCAACAAATACGGAAT
TAACTACCAGCAGGGCGATATTCGCGCCCTGTTATGTGAACAATCTGATAAAGCGTTTTACAGCTCCTTTATGGCAT
TAATGTCCTTAATGTTGCAGATGCGCAACTCGATCACGGGTCGTACAGACGTTGATTTCTTAATCTCACCGGTTAAG
AACAGTGACGGCATCTTCTACGACTCTCGCAACTACGAGGCACAGGAGAATGCCATCTTACCCAAGAACGCAGATGC
AAATGGTGCGTACAATATCGCTCGTAAAGTCCTTTGGGCAATCGGCCAATTCAAGAAGGCTGAAGACGAGAAGCTGG
ACAAGGTGAAAATCGCGATTTCTAATAAGGAATGGCTGGAGTATGCGCAGACGAGTGTAAAGCAC
(LbCas12a DNA sequence, codon-optimized for H. sapiens)
SEQ ID NO: 342
ATGTCTAAACTGGAGAAATTCACTAATTGCTACTCCTTGTCAAAAACATTGCGATTTAAAGCTATACCCGTTGGTAA
GACTCAGGAAAACATCGACAACAAACGGCTTCTGGTAGAGGACGAAAAACGCGCCGAGGATTATAAAGGAGTAAAAA
AACTGTTGGACAGGTACTACCTGAGTTTCATCAATGACGTGCTGCATAGTATTAAACTGAAAAACCTCAACAATTAC
ATCTCTCTGTTTAGAAAAAAGACACGGACGGAAAAGGAGAATAAAGAATTGGAGAATCTTGAGATAAACCTGCGCAA
GGAAATAGCCAAGGCATTCAAAGGAAACGAAGGCTACAAGTCCTTGTTTAAAAAGGATATTATCGAGACCATACTTC
CCGAGTTTTTGGACGACAAAGACGAAATCGCTCTGGTGAACTCTTTTAATGGCTTTACTACAGCCTTTACAGGATTT
TTTGACAACAGAGAGAATATGTTCTCTGAGGAGGCAAAGTCTACCAGCATTGCCTTCCGATGTATAAACGAAAACCT
GACAAGATATATATCAAACATGGACATTTTTGAAAAAGTTGATGCGATATTTGACAAACACGAGGTCCAAGAGATAA
AGGAAAAAATCCTGAACTCAGATTACGACGTGGAAGATTTTTTTGAGGGTGAGTTTTTCAATTTCGTTCTTACGCAG
GAGGGGATCGACGTATATAACGCTATCATTGGGGGCTTCGTTACCGAATCTGGAGAAAAGATCAAAGGCCTTAACGA
GTATATAAATCTGTACAATCAGAAAACGAAGCAAAAGCTCCCAAAGTTCAAGCCCCTTTATAAACAGGTCCTTAGTG
ACCGGGAAAGCCTCTCTTTCTATGGAGAAGGGTACACCTCCGATGAAGAGGTTCTGGAGGTGTTCCGAAATACTCTC
AATAAAAACTCTGAAATTTTCAGCAGCATCAAAAAATTGGAGAAGCTCTTTAAAAATTTCGACGAATATTCCTCTGC
TGGAATATTTGTGAAGAACGGACCCGCAATCTCTACCATAAGCAAGGATATCTTTGGTGAATGGAATGTAATTAGAG
ATAAATGGAATGCGGAGTACGATGACATCCACCTCAAAAAAAAGGCTGTCGTAACGGAGAAATACGAAGATGACCGC
AGAAAGAGTTTCAAAAAAATCGGTTCTTTTTCACTGGAACAGCTCCAGGAATACGCGGATGCCGACTTGAGCGTTGT
AGAAAAACTGAAAGAAATAATTATCCAGAAAGTAGATGAGATTTACAAAGTGTATGGGAGCAGCGAAAAACTTTTTG
ATGCAGATTTTGTACTTGAAAAAAGTCTTAAAAAAAATGATGCAGTTGTCGCCATTATGAAAGATCTCCTCGACAGT
GTAAAATCTTTTGAGAATTACATCAAGGCTTTTTTTGGCGAGGGCAAGGAGACGAATAGGGATGAAAGTTTTTATGG
TGACTTTGTACTTGCTTACGACATCCTGCTCAAGGTCGATCATATTTACGATGCTATACGCAATTACGTGACACAGA
AACCGTACTCTAAAGATAAGTTTAAGTTGTATTTCCAGAATCCTCAGTTCATGGGTGGCTGGGACAAGGATAAGGAG
ACAGATTATCGAGCGACTATTTTGCGCTATGGCTCTAAGTATTACCTCGCTATAATGGACAAAAAGTACGCTAAATG
CCTGCAGAAAATTGATAAGGACGACGTGAACGGTAACTATGAGAAAATTAACTATAAGTTGTTGCCCGGCCCTAATA
AGATGCTGCCGAAAGTCTTTTTCTCCAAAAAGTGGATGGCGTACTACAATCCATCAGAAGATATCCAGAAGATATAC
AAGAATGGCACCTTTAAGAAAGGAGATATGTTTAACCTTAACGACTGTCACAAGTTGATTGACTTCTTTAAGGATAG
CATTTCTCGATACCCAAAGTGGTCTAATGCATATGATTTCAATTTCTCTGAGACGGAGAAGTATAAAGACATTGCGG
GGTTCTACCGAGAAGTCGAAGAACAAGGGTACAAGGTAAGTTTTGAATCTGCTTCAAAAAAAGAGGTAGACAAACTG
GTAGAAGAGGGAAAACTCTACATGTTCCAGATCTATAATAAGGACTTCTCTGACAAAAGTCACGGTACTCCGAACCT
CCATACGATGTACTTCAAGCTGCTTTTTGATGAAAACAATCATGGCCAGATACGCCTCAGTGGAGGAGCGGAATTGT
TTATGCGCCGCGCCTCCCTGAAGAAAGAAGAGCTGGTAGTACATCCTGCCAATTCCCCAATCGCAAACAAAAATCCG
GATAATCCTAAAAAGACCACTACGTTGAGCTACGACGTTTACAAGGATAAGAGATTTTCCGAGGATCAGTACGAGCT
TCATATCCCTATCGCCATAAATAAGTGCCCAAAGAATATTTTCAAAATAAACACGGAAGTAAGAGTACTGCTCAAGC
ATGATGATAATCCCTACGTAATTGGAATTGATAGGGGGGAACGGAACTTGCTTTATATAGTCGTCGTCGATGGCAAA
GGGAACATTGTTGAACAATACTCTCTGAATGAGATCATCAACAACTTCAACGGTATCCGCATTAAAACTGATTATCA
TTCTCTCCTGGACAAAAAAGAAAAGGAAAGGTTCGAAGCGCGCCAGAACTGGACTTCAATTGAAAACATTAAGGAGC
TCAAAGCTGGCTATATATCTCAGGTTGTCCATAAGATATGCGAACTGGTAGAAAAATATGATGCCGTCATTGCTCTC
GAGGACCTGAACAGCGGTTTTAAGAACAGCCGGGTCAAAGTCGAAAAGCAGGTCTATCAAAAGTTCGAGAAGATGCT
CATAGACAAACTCAACTATATGGTCGATAAGAAGTCTAACCCGTGTGCTACGGGAGGGGCACTGAAGGGATACCAGA
TCACGAATAAGTTTGAATCATTCAAAAGCATGAGTACCCAAAATGGATTTATTTTCTACATTCCCGCGTGGTTGACC
TCAAAAATCGACCCTAGTACAGGATTCGTGAACCTGCTGAAGACTAAGTACACTAGTATTGCGGATAGCAAGAAATT
TATAAGCTCTTTTGACCGCATTATGTACGTACCCGAAGAAGATTTGTTTGAGTTCGCTCTCGACTACAAAAATTTTA
GCAGAACCGACGCCGATTACATAAAGAAGTGGAAACTCTACTCTTATGGGAACCGCATACGCATATTCCGAAACCCT
AAAAAAAACAATGTATTCGATTGGGAAGAGGTTTGCCTGACCAGCGCGTACAAAGAGCTTTTTAACAAGTATGGTAT
AAATTATCAGCAGGGTGACATCCGCGCCTTGTTGTGTGAGCAAAGTGACAAGGCGTTCTACAGTTCATTTATGGCGT
TGATGTCCCTCATGTTGCAGATGCGAAATTCCATCACGGGGAGGACAGATGTAGATTTCCTCATCTCTCCGGTCAAG
AACAGTGATGGCATCTTTTACGACAGCCGGAATTACGAGGCGCAGGAGAATGCCATACTCCCTAAGAATGCGGACGC
GAACGGAGCATATAACATCGCGCGAAAAGTCCTGTGGGCTATTGGTCAATTCAAAAAGGCTGAAGATGAGAAGTTGG
ACAAGGTGAAGATAGCCATTAGTAACAAGGAATGGTTGGAGTACGCTCAGACATCAGTGAAACAT

### Example 9

### Sequences of Fluorescent Proteins

(eGFP protein amino acid sequence) (Cormack et
al. (1996)).
SEQ ID NO: 4
MVSKGEELFTGVVPILVELDGDVNGHKFSVSGEGEGDATYGKLTLKFIC
TTGKLPVPWPTLVTTLTYGVQCFSRYPDHMKQHDFFKSAMPEGYVQERT
IFFKDDGNYKTRAEVKFEGDTLVNRIELKGIDFKEDGNILGHKLEYNYN
SHNVYIMADKQKNGIKVNFKIRHNIEDGSVQLADHYQQNTPIGDGPVLL
PDNHYLSTQSALSKDPNEKRDHMVLLEFVTAAGITLGMDELYK
eGFP DNA sequence
(codon-optimized for E. coli)
SEQ ID NO: 343
ATGGTAAGTAAAGGTGAAGAGCTTTTTACAGGTGTGGTGCCCATCCTTG
TGGAGTTGGACGGTGATGTCAATGGCCATAAATTTTCTGTGTCTGGTGA
AGGGGAAGGGGACGCGACGTATGGAAAACTTACCCTGAAGTTTATCTGC
ACGACAGGTAAGTTGCCAGTACCGTGGCCTACCCTGGTCACCACATTAA
CATATGGTGTTCAATGCTTTTCACGCTACCCTGACCACATGAAACAACA
TGACTTTTTTAAAAGTGCCATGCCAGAGGGCTACGTGCAGGAACGCACA
ATCTTTTTCAAAGACGACGGCAATTATAAAACACGCGCGGAGGTAAAGT
TTGAGGGAGACACACTGGTTAATCGCATCGAACTGAAAGGCATTGACTT
TAAGGAGGATGGGAATATCTTAGGCCATAAACTGGAGTATAACTATAAC
TCTCACAACGTCTATATTATGGCGGACAAGCAAAAGAATGGTATCAAGG
TAAACTTTAAGATTCGTCATAACATTGAGGATGGGAGCGTGCAGTTGGC
TGACCACTATCAGCAGAATACTCCCATTGGCGACGGCCCCGTGCTTTTA
CCTGACAATCACTATCTTTCTACGCAGTCAGCTTTGTCCAAAGACCCCA
ACGAGAAGCGTGATCACATGGTTCTTCTGGAATTCGTCACAGCCGCCGG
AATCACTTTAGGCATGGACGAACTTTATAAA
eGFP DNA sequence
(codon-optimized for H. sapiens)
SEQ ID NO: 344
ATGGTCTCAAAAGGCGAAGAATTGTTCACCGGTGTAGTCCCTATCTTGG
TGGAGCTTGACGGCGATGTTAATGGCCATAAATTTAGTGTGTCCGGCGA
AGGTGAGGGCGACGCCACATATGGTAAACTTACGCTTAAATTTATTTGC
ACGACGGGAAAGCTCCCCGTGCCGTGGCCAACCCTTGTAACTACCCTTA
CGTACGGGGTGCAGTGCTTCAGTAGGTATCCCGACCATATGAAGCAGCA
CGATTTTTTCAAAAGTGCTATGCCCGAGGGGTATGTGCAAGAGAGGACT
ATATTCTTTAAGGATGATGGGAATTACAAGACGCGAGCCGAGGTTAAGT
TCGAAGGTGATACGCTTGTAAATCGAATCGAATTGAAAGGGATTGACTT
TAAGGAAGACGGAAATATACTTGGACACAAATTGGAATATAACTACAAC
AGCCACAACGTCTATATAATGGCCGACAAGCAAAAGAACGGAATAAAAG
TCAACTTTAAGATTCGACACAATATAGAGGATGGATCCGTGCAGCTTGC
TGACCACTATCAGCAGAACACTCCGATAGGCGATGGACCAGTGCTGCTT
CCCGACAATCACTACCTCTCCACGCAGTCTGCTCTGTCTAAAGACCCTA
ATGAAAAACGAGACCACATGGTGCTGCTCGAATTTGTCACTGCCGCCGG
GATTACCTTGGGAATGGACGAACTGTATAAG
(mCherry amino acid sequence) (Shaner et
al. (12004).
SEQ ID NO: 5
MVSKGEEDNMAIIKEFMRFKVHMEGSVNGHEFEIEGEGEGRPYEGTQTA
KLKVTKGGPLPFAWDILSPQFMYGSKAYVKHPADIPDYLKLSFPEGFKW
ERVMNFEDGGVVTVTQDSSLQDGEFIYKVKLRGTNFPSDGPVMQKKTMG
WEASSERMYPEDGALKGEIKQRLKLKDGGHYDAEVKTTYKAKKPVQLPG
AYNVNIKLDITSHNEDYTIVEQYERAEGRHSTGGMDELYK
(mCherry DNA sequence codon-optimized
for E. coli)
SEQ ID NO: 345
ATGGTGTCCAAAGGAGAAGAGGATAACATGGCGATCATCAAGGAATTTA
TGCGTTTCAAAGTTCACATGGAGGGAAGCGTAAACGGCCATGAATTTGA
GATTGAGGGGGAAGGCGAAGGCCGTCCATACGAAGGCACTCAAACCGCC
AAGCTTAAGGTTACCAAGGGAGGTCCGCTTCCTTTCGCCTGGGATATCC
TTAGCCCACAGTTCATGTATGGCTCTAAAGCATACGTCAAGCACCCTGC
AGACATTCCTGATTATTTGAAACTTAGTTTTCCTGAGGGTTTTAAGTGG
GAACGCGTTATGAATTTCGAGGATGGAGGAGTAGTGACAGTAACTCAAG
ATTCCAGTCTTCAAGACGGAGAGTTTATCTACAAGGTGAAATTACGTGG
CACGAACTTTCCATCCGACGGGCCAGTGATGCAGAAGAAAACCATGGGT
TGGGAGGCATCTTCTGAGCGTATGTACCCGGAAGACGGGGCGTTGAAAG
GCGAAATCAAGCAGCGCCTGAAGTTGAAAGACGGGGGTCACTACGATGC
GGAAGTAAAAACTACATATAAGGCCAAGAAGCCCGTCCAGCTTCCGGGC
GCGTACAACGTCAACATCAAATTGGACATTACTTCCCACAACGAGGATT
ACACTATTGTTGAACAATATGAGCGTGCGGAGGGACGCCATTCAACCGG
GGGGATGGATGAGCTTTACAAG
(mCherry DNA sequence codon-optimized for
H. sapiens)
SEQ ID NO: 346
ATGGTCAGTAAGGGGGAAGAGGACAACATGGCGATAATCAAGGAATTTA
TGAGATTTAAGGTCCATATGGAAGGCTCTGTCAACGGTCATGAGTTCGA
AATTGAGGGGGAGGGGGAAGGCCGCCCATATGAGGGGACTCAAACAGCC
AAACTTAAGGTCACAAAAGGAGGTCCTCTGCCCTTCGCGTGGGACATAC
TCAGCCCACAATTCATGTATGGAAGTAAGGCATATGTTAAACACCCGGC
GGACATACCCGACTACCTCAAACTGTCATTTCCTGAGGGTTTTAAGTGG
GAGAGGGTTATGAATTTCGAGGACGGTGGAGTAGTAACAGTGACACAAG
ACTCTTCTCTCCAGGATGGAGAATTTATATACAAAGTGAAACTGCGGGG
CACTAACTTTCCGTCAGACGGCCCAGTAATGCAAAAGAAAACTATGGGG
TGGGAGGCTTCCAGCGAGCGCATGTATCCCGAGGATGGGGCCCTTAAGG
GAGAAATAAAACAACGCTTGAAGCTCAAAGACGGAGGGCACTATGATGC
GGAGGTCAAAACGACCTACAAAGCAAAAAAGCCAGTACAGCTTCCGGGA
GCTTATAACGTGAATATAAAGCTCGATATAACCTCACACAACGAGGACT
ACACGATTGTAGAACAATACGAAAGAGCCGAGGGGAGACATAGTACGGG
GGGCATGGACGAACTTTACAAG

### Example 10

### Sequences of Chimeric Proteins

[0095] Table V.1 provides chimera fusion proteins between Cas9 amino acid sequences, linker amino acid sequences (underlined), and eGFP amino acid sequences (bolded, italicized).

TABLE V.1
Cas9-Linker-eGFP Chimeras

SEQ ID NO: 38
MDKKYSIGLDIGINSVGWAVITDEYKVPSKKEKVLGNTDRHSIKKNLIGALLFDSGETAEATRLKRTARRRYTRRK
NRICYLQEIFSNEMAKVDDSFFHRLEESFLVEEDKKHERHPIFGNIVDEVAYHEKYPTIYHLRKKLVDSTDKADLR
LIYLALAHMIKFRGHFLIEGDLNPDNSDVDKLFIQLVQTYNQLFEENPINASGVDAKAILSARLSKSRRLENLIAQ
LPGEKKNGLEGNLIALSLGLIPNEKSNEDLAEDAKLQLSKDTYDDDLDNLLAQIGDQYADLFLAAKNLSDAILLSD
ILRVNTEITKAPLSASMIKRYDEHHQDLTLLKALVRQQLPEKYKEIFFDQSKNGYAGYIDGGASQEEFYKFIKPIL
EKMDGTEELLVKLNREDLLRKQRTFDNGSIPHQIHLGELHAILRRQEDFYPFLKDNREKIEKILTFRIPYYVGPLA
RGNSRFAWMTRKSEETITPWNFEEVVDKGASAQSFIERMTNEDKNLPNEKVLPKHSLLYEYFTVYNELTKVKYVTE
GMRKPAFLSGEQKKAIVDLLFKINRKVIVKQLKEDYFKKIECFDSVEISGVEDRFNASLGTYHDLLKIIKDKDFLD
NEENEDILEDIVLTLTLFEDREMIEERLKTYAHLFDDKVMKQLKRRRYTGWGRLSRKLINGIRDKQSGKTILDFLK
SDGFANRNFMQLIHDDSLTFKEDIQKAQVSGQGDSLHEHIANLAGSPAIKKGILQTVKVVDELVKVMGRHKPENIV
IEMARENQTTQKGQKNSRERMKRIEEGIKELGSQILKEHPVENTQLQNEKLYLYYLQNGRDMYVDQELDINRLSDY
DVDHIVPQSFLKDDSIDNKVLTRSDKNRGKSDNVPSEEVVKKMKNYWRQLLNAKLITQRKEDNLIKAERGGLSELD
KAGFIKRQLVETRQITKHVAQILDSRMNTKYDENDKLIREVKVITLKSKLVSDERKDFQFYKVREINNYHHAHDAY
LNAVVGTALIKKYPKLESEFVYGDYKVYDVRKMIAKSEQEIGKATAKYFFYSNIMNFFKTEITLANGEIRKRPLIE
TNGETGEIVWDKGRDFATVRKVLSMPQVNIVKKTEVQTGGESKESILPKRNSDKLIARKKDWDPKKYGGFDSPTVA
YSVLVVAKVEKGKSKKLKSVKELLGITIMERSSFEKNPIDFLEAKGYKEVKKDLIIKLPKYSLFELENGRKRMLAS
AGELQKGNELALPSKYVNFLYLASHYEKLKGSPEDNEQKQLFVEQHKHYLDEIIEQISEFSKRVILADANLDKVLS
AYNKHRDKPIREQAENIIHLFTLTNLGAPAAFKYFDTTIDRKRYTSTKEVLDATLIHQSITGLYETRIDLSQLGGD
GSAGSAAGSGEF
MVSKGEELFTGVVPILVELDGDVNGHKFSVSGEGEGDATYGKLTLKFICTTGKLPVPWPTLVTT
LTYGVQCFSRYPDHMKQHDFFKSAMPEGYVQERTIFFKDDGNYKTRAEVKFEGDTLVNRIELKGIDFKEDGNILGH
KLEYNYNSHNVYIMADKQKNGIKVNFKIRHNIEDGSVQLADHYQQNTPIGDGPVLLPDNHYLSTQSALSKDPNEKR
DHMVLLEFVTAAGITLGMDELYK
SEQ ID NO: 39
MDKKYSIGLDIGINSVGWAVITDEYKVPSKKEKVLGNTDRHSIKKNLIGALLFDSGETAEATRLKRTARRRYTRRK
NRICYLQEIFSNEMAKVDDSFFHRLEESFLVEEDKKHERHPIFGNIVDEVAYHEKYPTIYHLRKKLVDSTDKADLR
LIYLALAHMIKFRGHFLIEGDLNPDNSDVDKLFIQLVQTYNQLFEENPINASGVDAKAILSARLSKSRRLENLIAQ
LPGEKKNGLEGNLIALSLGLIPNEKSNEDLAEDAKLQLSKDTYDDDLDNLLAQIGDQYADLFLAAKNLSDAILLSD
ILRVNTEITKAPLSASMIKRYDEHHQDLTLLKALVRQQLPEKYKEIFFDQSKNGYAGYIDGGASQEEFYKFIKPIL
EKMDGTEELLVKLNREDLLRKQRTFDNGSIPHQIHLGELHAILRRQEDFYPFLKDNREKIEKILTFRIPYYVGPLA
RGNSRFAWMTRKSEETITPWNFEEVVDKGASAQSFIERMTNEDKNLPNEKVLPKHSLLYEYFTVYNELTKVKYVTE
GMRKPAFLSGEQKKAIVDLLFKINRKVIVKQLKEDYFKKIECFDSVEISGVEDRFNASLGTYHDLLKIIKDKDFLD
NEENEDILEDIVLTLTLFEDREMIEERLKTYAHLFDDKVMKQLKRRRYTGWGRLSRKLINGIRDKQSGKTILDFLK
SDGFANRNFMQLIHDDSLTFKEDIQKAQVSGQGDSLHEHIANLAGSPAIKKGILQTVKVVDELVKVMGRHKPENIV
IEMARENQTTQKGQKNSRERMKRIEEGIKELGSQILKEHPVENTQLQNEKLYLYYLQNGRDMYVDQELDINRLSDY
DVDHIVPQSFLKDDSIDNKVLTRSDKNRGKSDNVPSEEVVKKMKNYWRQLLNAKLITQRKEDNLIKAERGGLSELD
KAGFIKRQLVETRQITKHVAQILDSRMNTKYDENDKLIREVKVITLKSKLVSDERKDFQFYKVREINNYHHAHDAY
LNAVVGTALIKKYPKLESEFVYGDYKVYDVRKMIAKSEQEIGKATAKYFFYSNIMNFFKTEITLANGEIRKRPLIE
TNGETGEIVWDKGRDFATVRKVLSMPQVNIVKKTEVQTGGESKESILPKRNSDKLIARKKDWDPKKYGGFDSPTVA
YSVLVVAKVEKGKSKKLKSVKELLGITIMERSSFEKNPIDFLEAKGYKEVKKDLIIKLPKYSLFELENGRKRMLAS
AGELQKGNELALPSKYVNFLYLASHYEKLKGSPEDNEQKQLFVEQHKHYLDEIIEQISEFSKRVILADANLDKVLS
AYNKHRDKPIREQAENIIHLFTLTNLGAPAAFKYFDTTIDRKRYTSTKEVLDATLIHQSITGLYETRIDLSQLGGD
GGGGSGGGGSGGGGSGGGGS
MVSKGEELFTGVVPILVELDGDVNGHKFSVSGEGEGDATYGKLTLKFICTTGKLPVPWPTLVTT
LTYGVQCFSRYPDHMKQHDFFKSAMPEGYVQERTIFFKDDGNYKTRAEVKFEGDTLVNRIELKGIDFKEDGNILGH
KLEYNYNSHNVYIMADKQKNGIKVNFKIRHNIEDGSVQLADHYQQNTPIGDGPVLLPDNHYLSTQSALSKDPNEKR
DHMVLLEFVTAAGITLGMDELYK
SEQ ID NO: 40
MDKKYSIGLDIGINSVGWAVITDEYKVPSKKEKVLGNTDRHSIKKNLIGALLFDSGETAEATRLKRTARRRYTRRK
NRICYLQEIFSNEMAKVDDSFFHRLEESFLVEEDKKHERHPIFGNIVDEVAYHEKYPTIYHLRKKLVDSTDKADLR
LIYLALAHMIKFRGHFLIEGDLNPDNSDVDKLFIQLVQTYNQLFEENPINASGVDAKAILSARLSKSRRLENLIAQ
LPGEKKNGLEGNLIALSLGLIPNEKSNEDLAEDAKLQLSKDTYDDDLDNLLAQIGDQYADLFLAAKNLSDAILLSD
ILRVNTEITKAPLSASMIKRYDEHHQDLTLLKALVRQQLPEKYKEIFFDQSKNGYAGYIDGGASQEEFYKFIKPIL
EKMDGTEELLVKLNREDLLRKQRTFDNGSIPHQIHLGELHAILRRQEDFYPFLKDNREKIEKILTFRIPYYVGPLA
RGNSRFAWMTRKSEETITPWNFEEVVDKGASAQSFIERMTNEDKNLPNEKVLPKHSLLYEYFTVYNELTKVKYVTE
GMRKPAFLSGEQKKAIVDLLFKINRKVIVKQLKEDYFKKIECFDSVEISGVEDRFNASLGTYHDLLKIIKDKDFLD
NEENEDILEDIVLTLTLFEDREMIEERLKTYAHLFDDKVMKQLKRRRYTGWGRLSRKLINGIRDKQSGKTILDFLK
SDGFANRNFMQLIHDDSLTFKEDIQKAQVSGQGDSLHEHIANLAGSPAIKKGILQTVKVVDELVKVMGRHKPENIV
IEMARENQTTQKGQKNSRERMKRIEEGIKELGSQILKEHPVENTQLQNEKLYLYYLQNGRDMYVDQELDINRLSDY
DVDHIVPQSFLKDDSIDNKVLTRSDKNRGKSDNVPSEEVVKKMKNYWRQLLNAKLITQRKEDNLIKAERGGLSELD
KAGFIKRQLVETRQITKHVAQILDSRMNTKYDENDKLIREVKVITLKSKLVSDERKDFQFYKVREINNYHHAHDAY
LNAVVGTALIKKYPKLESEFVYGDYKVYDVRKMIAKSEQEIGKATAKYFFYSNIMNFFKTEITLANGEIRKRPLIE
TNGETGEIVWDKGRDFATVRKVLSMPQVNIVKKTEVQTGGESKESILPKRNSDKLIARKKDWDPKKYGGFDSPTVA
YSVLVVAKVEKGKSKKLKSVKELLGITIMERSSFEKNPIDFLEAKGYKEVKKDLIIKLPKYSLFELENGRKRMLAS
AGELQKGNELALPSKYVNFLYLASHYEKLKGSPEDNEQKQLFVEQHKHYLDEIIEQISEFSKRVILADANLDKVLS
AYNKHRDKPIREQAENIIHLFTLTNLGAPAAFKYFDTTIDRKRYTSTKEVLDATLIHQSITGLYETRIDLSQLGGD
AEAAAKEAAAKEAAAKEAAAKA
MVSKGEELFTGVVPILVELDGDVNGHKFSVSGEGEGDATYGKLTLKFICTTGKLPVPWPTLVTT
LTYGVQCFSRYPDHMKQHDFFKSAMPEGYVQERTIFFKDDGNYKTRAEVKFEGDTLVNRIELKGIDFKEDGNILGH
KLEYNYNSHNVYIMADKQKNGIKVNFKIRHNIEDGSVQLADHYQQNTPIGDGPVLLPDNHYLSTQSALSKDPNEKR
DHMVLLEFVTAAGITLGMDELYK
SEQ ID NO: 41
MDKKYSIGLDIGINSVGWAVITDEYKVPSKKEKVLGNTDRHSIKKNLIGALLFDSGETAEATRLKRTARRRYTRRK
NRICYLQEIFSNEMAKVDDSFFHRLEESFLVEEDKKHERHPIFGNIVDEVAYHEKYPTIYHLRKKLVDSTDKADLR
LIYLALAHMIKFRGHFLIEGDLNPDNSDVDKLFIQLVQTYNQLFEENPINASGVDAKAILSARLSKSRRLENLIAQ
LPGEKKNGLEGNLIALSLGLIPNEKSNEDLAEDAKLQLSKDTYDDDLDNLLAQIGDQYADLFLAAKNLSDAILLSD
ILRVNTEITKAPLSASMIKRYDEHHQDLTLLKALVRQQLPEKYKEIFFDQSKNGYAGYIDGGASQEEFYKFIKPIL
EKMDGTEELLVKLNREDLLRKQRTFDNGSIPHQIHLGELHAILRRQEDFYPFLKDNREKIEKILTFRIPYYVGPLA
RGNSRFAWMTRKSEETITPWNFEEVVDKGASAQSFIERMTNEDKNLPNEKVLPKHSLLYEYFTVYNELTKVKYVTE
GMRKPAFLSGEQKKAIVDLLFKINRKVIVKQLKEDYFKKIECFDSVEISGVEDRFNASLGTYHDLLKIIKDKDFLD
NEENEDILEDIVLTLTLFEDREMIEERLKTYAHLFDDKVMKQLKRRRYTGWGRLSRKLINGIRDKQSGKTILDFLK
SDGFANRNFMQLIHDDSLTFKEDIQKAQVSGQGDSLHEHIANLAGSPAIKKGILQTVKVVDELVKVMGRHKPENIV
IEMARENQTTQKGQKNSRERMKRIEEGIKELGSQILKEHPVENTQLQNEKLYLYYLQNGRDMYVDQELDINRLSDY
DVDHIVPQSFLKDDSIDNKVLTRSDKNRGKSDNVPSEEVVKKMKNYWRQLLNAKLITQRKEDNLIKAERGGLSELD
KAGFIKRQLVETRQITKHVAQILDSRMNTKYDENDKLIREVKVITLKSKLVSDERKDFQFYKVREINNYHHAHDAY
LNAVVGTALIKKYPKLESEFVYGDYKVYDVRKMIAKSEQEIGKATAKYFFYSNIMNFFKTEITLANGEIRKRPLIE
TNGETGEIVWDKGRDFATVRKVLSMPQVNIVKKTEVQTGGESKESILPKRNSDKLIARKKDWDPKKYGGFDSPTVA
YSVLVVAKVEKGKSKKLKSVKELLGITIMERSSFEKNPIDFLEAKGYKEVKKDLIIKLPKYSLFELENGRKRMLAS
AGELQKGNELALPSKYVNFLYLASHYEKLKGSPEDNEQKQLFVEQHKHYLDEIIEQISEFSKRVILADANLDKVLS
AYNKHRDKPIREQAENIIHLFTLTNLGAPAAFKYFDTTIDRKRYTSTKEVLDATLIHQSITGLYETRIDLSQLGGD
AEAAAKEAAAKEAAAKEAAAKALEAEAAAKEAAAKEAAAKEAAAKA
MVSKGEELFTGVVPILVELDGDVNGHKFSVSGEGEGDATYGKLTLKFICTTGKLPVPWPTLVTT
LTYGVQCFSRYPDHMKQHDFFKSAMPEGYVQERTIFFKDDGNYKTRAEVKFEGDTLVNRIELKGIDFKEDGNILGH
KLEYNYNSHNVYIMADKQKNGIKVNFKIRHNIEDGSVQLADHYQQNTPIGDGPVLLPDNHYLSTQSALSKDPNEKR
DHMVLLEFVTAAGITLGMDELYK
SEQ ID NO: 42
MDKKYSIGLDIGINSVGWAVITDEYKVPSKKEKVLGNTDRHSIKKNLIGALLFDSGETAEATRLKRTARRRYTRRK
NRICYLQEIFSNEMAKVDDSFFHRLEESFLVEEDKKHERHPIFGNIVDEVAYHEKYPTIYHLRKKLVDSTDKADLR
LIYLALAHMIKFRGHFLIEGDLNPDNSDVDKLFIQLVQTYNQLFEENPINASGVDAKAILSARLSKSRRLENLIAQ
LPGEKKNGLEGNLIALSLGLIPNEKSNEDLAEDAKLQLSKDTYDDDLDNLLAQIGDQYADLFLAAKNLSDAILLSD
ILRVNTEITKAPLSASMIKRYDEHHQDLTLLKALVRQQLPEKYKEIFFDQSKNGYAGYIDGGASQEEFYKFIKPIL
EKMDGTEELLVKLNREDLLRKQRTFDNGSIPHQIHLGELHAILRRQEDFYPFLKDNREKIEKILTFRIPYYVGPLA
RGNSRFAWMTRKSEETITPWNFEEVVDKGASAQSFIERMTNEDKNLPNEKVLPKHSLLYEYFTVYNELTKVKYVTE
GMRKPAFLSGEQKKAIVDLLFKINRKVIVKQLKEDYFKKIECFDSVEISGVEDRFNASLGTYHDLLKIIKDKDFLD
NEENEDILEDIVLTLTLFEDREMIEERLKTYAHLFDDKVMKQLKRRRYTGWGRLSRKLINGIRDKQSGKTILDFLK
SDGFANRNFMQLIHDDSLTFKEDIQKAQVSGQGDSLHEHIANLAGSPAIKKGILQTVKVVDELVKVMGRHKPENIV
IEMARENQTTQKGQKNSRERMKRIEEGIKELGSQILKEHPVENTQLQNEKLYLYYLQNGRDMYVDQELDINRLSDY
DVDHIVPQSFLKDDSIDNKVLTRSDKNRGKSDNVPSEEVVKKMKNYWRQLLNAKLITQRKEDNLIKAERGGLSELD
KAGFIKRQLVETRQITKHVAQILDSRMNTKYDENDKLIREVKVITLKSKLVSDERKDFQFYKVREINNYHHAHDAY
LNAVVGTALIKKYPKLESEFVYGDYKVYDVRKMIAKSEQEIGKATAKYFFYSNIMNFFKTEITLANGEIRKRPLIE
TNGETGEIVWDKGRDFATVRKVLSMPQVNIVKKTEVQTGGESKESILPKRNSDKLIARKKDWDPKKYGGFDSPTVA
YSVLVVAKVEKGKSKKLKSVKELLGITIMERSSFEKNPIDFLEAKGYKEVKKDLIIKLPKYSLFELENGRKRMLAS
AGELQKGNELALPSKYVNFLYLASHYEKLKGSPEDNEQKQLFVEQHKHYLDEIIEQISEFSKRVILADANLDKVLS
AYNKHRDKPIREQAENIIHLFTLTNLGAPAAFKYFDTTIDRKRYTSTKEVLDATLIHQSITGLYETRIDLSQLGGD
LEAEAAAKEAAAKEAAAKEAAAKALEAEAAAKEAAAKEAAAKEAAAKALE
MVSKGEELFTGVVPILVELDGDVNGHKFSVSGEGEGDATYGKLTLKFICTTGKLPVPWPTLVTT
LTYGVQCFSRYPDHMKQHDFFKSAMPEGYVQERTIFFKDDGNYKTRAEVKFEGDTLVNRIELKGIDFKEDGNILGH
KLEYNYNSHNVYIMADKQKNGIKVNFKIRHNIEDGSVQLADHYQQNTPIGDGPVLLPDNHYLSTQSALSKDPNEKR
DHMVLLEFVTAAGITLGMDELYK
SEQ ID NO: 43
MDKKYSIGLDIGINSVGWAVITDEYKVPSKKEKVLGNTDRHSIKKNLIGALLFDSGETAEATRLKRTARRRYTRRK
NRICYLQEIFSNEMAKVDDSFFHRLEESFLVEEDKKHERHPIFGNIVDEVAYHEKYPTIYHLRKKLVDSTDKADLR
LIYLALAHMIKFRGHFLIEGDLNPDNSDVDKLFIQLVQTYNQLFEENPINASGVDAKAILSARLSKSRRLENLIAQ
LPGEKKNGLEGNLIALSLGLIPNEKSNEDLAEDAKLQLSKDTYDDDLDNLLAQIGDQYADLFLAAKNLSDAILLSD
ILRVNTEITKAPLSASMIKRYDEHHQDLTLLKALVRQQLPEKYKEIFFDQSKNGYAGYIDGGASQEEFYKFIKPIL
EKMDGTEELLVKLNREDLLRKQRTFDNGSIPHQIHLGELHAILRRQEDFYPFLKDNREKIEKILTFRIPYYVGPLA
RGNSRFAWMTRKSEETITPWNFEEVVDKGASAQSFIERMTNEDKNLPNEKVLPKHSLLYEYFTVYNELTKVKYVTE
GMRKPAFLSGEQKKAIVDLLFKINRKVIVKQLKEDYFKKIECFDSVEISGVEDRFNASLGTYHDLLKIIKDKDFLD
NEENEDILEDIVLTLTLFEDREMIEERLKTYAHLFDDKVMKQLKRRRYTGWGRLSRKLINGIRDKQSGKTILDFLK
SDGFANRNFMQLIHDDSLTFKEDIQKAQVSGQGDSLHEHIANLAGSPAIKKGILQTVKVVDELVKVMGRHKPENIV
IEMARENQTTQKGQKNSRERMKRIEEGIKELGSQILKEHPVENTQLQNEKLYLYYLQNGRDMYVDQELDINRLSDY
DVDHIVPQSFLKDDSIDNKVLTRSDKNRGKSDNVPSEEVVKKMKNYWRQLLNAKLITQRKEDNLIKAERGGLSELD
KAGFIKRQLVETRQITKHVAQILDSRMNTKYDENDKLIREVKVITLKSKLVSDERKDFQFYKVREINNYHHAHDAY
LNAVVGTALIKKYPKLESEFVYGDYKVYDVRKMIAKSEQEIGKATAKYFFYSNIMNFFKTEITLANGEIRKRPLIE
TNGETGEIVWDKGRDFATVRKVLSMPQVNIVKKTEVQTGGESKESILPKRNSDKLIARKKDWDPKKYGGFDSPTVA
YSVLVVAKVEKGKSKKLKSVKELLGITIMERSSFEKNPIDFLEAKGYKEVKKDLIIKLPKYSLFELENGRKRMLAS
AGELQKGNELALPSKYVNFLYLASHYEKLKGSPEDNEQKQLFVEQHKHYLDEIIEQISEFSKRVILADANLDKVLS
AYNKHRDKPIREQAENIIHLFTLTNLGAPAAFKYFDTTIDRKRYTSTKEVLDATLIHQSITGLYETRIDLSQLGGD
APAMVSKGEELFTGVVPILVELDGDVNGHKFSVSGEGEGDATYGKLTLKFICTTGKLPVPWPTLVTT
LTYGVQCFSRYPDHMKQHDFFKSAMPEGYVQERTIFFKDDGNYKTRAEVKFEGDTLVNRIELKGIDFKEDGNILGH
KLEYNYNSHNVYIMADKQKNGIKVNFKIRHNIEDGSVQLADHYQQNTPIGDGPVLLPDNHYLSTQSALSKDPNEKR
DHMVLLEFVTAAGITLGMDELYK
SEQ ID NO: 44
MDKKYSIGLDIGINSVGWAVITDEYKVPSKKEKVLGNTDRHSIKKNLIGALLFDSGETAEATRLKRTARRRYTRRK
NRICYLQEIFSNEMAKVDDSFFHRLEESFLVEEDKKHERHPIFGNIVDEVAYHEKYPTIYHLRKKLVDSTDKADLR
LIYLALAHMIKFRGHFLIEGDLNPDNSDVDKLFIQLVQTYNQLFEENPINASGVDAKAILSARLSKSRRLENLIAQ
LPGEKKNGLEGNLIALSLGLIPNEKSNEDLAEDAKLQLSKDTYDDDLDNLLAQIGDQYADLFLAAKNLSDAILLSD
ILRVNTEITKAPLSASMIKRYDEHHQDLTLLKALVRQQLPEKYKEIFFDQSKNGYAGYIDGGASQEEFYKFIKPIL
EKMDGTEELLVKLNREDLLRKQRTFDNGSIPHQIHLGELHAILRRQEDFYPFLKDNREKIEKILTFRIPYYVGPLA
RGNSRFAWMTRKSEETITPWNFEEVVDKGASAQSFIERMTNEDKNLPNEKVLPKHSLLYEYFTVYNELTKVKYVTE
GMRKPAFLSGEQKKAIVDLLFKINRKVIVKQLKEDYFKKIECFDSVEISGVEDRFNASLGTYHDLLKIIKDKDFLD
NEENEDILEDIVLTLTLFEDREMIEERLKTYAHLFDDKVMKQLKRRRYTGWGRLSRKLINGIRDKQSGKTILDFLK
SDGFANRNFMQLIHDDSLTFKEDIQKAQVSGQGDSLHEHIANLAGSPAIKKGILQTVKVVDELVKVMGRHKPENIV
IEMARENQTTQKGQKNSRERMKRIEEGIKELGSQILKEHPVENTQLQNEKLYLYYLQNGRDMYVDQELDINRLSDY
DVDHIVPQSFLKDDSIDNKVLTRSDKNRGKSDNVPSEEVVKKMKNYWRQLLNAKLITQRKEDNLIKAERGGLSELD
KAGFIKRQLVETRQITKHVAQILDSRMNTKYDENDKLIREVKVITLKSKLVSDERKDFQFYKVREINNYHHAHDAY
LNAVVGTALIKKYPKLESEFVYGDYKVYDVRKMIAKSEQEIGKATAKYFFYSNIMNFFKTEITLANGEIRKRPLIE
TNGETGEIVWDKGRDFATVRKVLSMPQVNIVKKTEVQTGGESKESILPKRNSDKLIARKKDWDPKKYGGFDSPTVA
YSVLVVAKVEKGKSKKLKSVKELLGITIMERSSFEKNPIDFLEAKGYKEVKKDLIIKLPKYSLFELENGRKRMLAS
AGELQKGNELALPSKYVNFLYLASHYEKLKGSPEDNEQKQLFVEQHKHYLDEIIEQISEFSKRVILADANLDKVLS
AYNKHRDKPIREQAENIIHLFTLINLGAPAAFKYFDTTIDRKRYTSTKEVLDATLIHQSITGLYETRIDLSQLGGD
APAPAMVSKGEELFTGVVPILVELDGDVNGHKFSVSGEGEGDATYGKLTLKFICTTGKLPVPWPTLVTT
LTYGVQCFSRYPDHMKQHDFFKSAMPEGYVQERTIFFKDDGNYKTRAEVKFEGDTLVNRIELKGIDFKEDGNILGH
KLEYNYNSHNVYIMADKQKNGIKVNFKIRHNIEDGSVQLADHYQQNTPIGDGPVLLPDNHYLSTQSALSKDPNEKR
DHMVLLEFVTAAGITLGMDELYK
SEQ ID NO: 45
MDKKYSIGLDIGINSVGWAVITDEYKVPSKKEKVLGNTDRHSIKKNLIGALLFDSGETAEATRLKRTARRRYTRRK
NRICYLQEIFSNEMAKVDDSFFHRLEESFLVEEDKKHERHPIFGNIVDEVAYHEKYPTIYHLRKKLVDSTDKADLR
LIYLALAHMIKFRGHFLIEGDLNPDNSDVDKLFIQLVQTYNQLFEENPINASGVDAKAILSARLSKSRRLENLIAQ
LPGEKKNGLEGNLIALSLGLIPNEKSNEDLAEDAKLQLSKDTYDDDLDNLLAQIGDQYADLFLAAKNLSDAILLSD
ILRVNTEITKAPLSASMIKRYDEHHQDLTLLKALVRQQLPEKYKEIFFDQSKNGYAGYIDGGASQEEFYKFIKPIL
EKMDGTEELLVKLNREDLLRKQRTFDNGSIPHQIHLGELHAILRRQEDFYPFLKDNREKIEKILTFRIPYYVGPLA
RGNSRFAWMTRKSEETITPWNFEEVVDKGASAQSFIERMTNEDKNLPNEKVLPKHSLLYEYFTVYNELTKVKYVTE
GMRKPAFLSGEQKKAIVDLLFKINRKVIVKQLKEDYFKKIECFDSVEISGVEDRFNASLGTYHDLLKIIKDKDFLD
NEENEDILEDIVLTLTLFEDREMIEERLKTYAHLFDDKVMKQLKRRRYTGWGRLSRKLINGIRDKQSGKTILDFLK
SDGFANRNFMQLIHDDSLTFKEDIQKAQVSGQGDSLHEHIANLAGSPAIKKGILQTVKVVDELVKVMGRHKPENIV
IEMARENQTTQKGQKNSRERMKRIEEGIKELGSQILKEHPVENTQLQNEKLYLYYLQNGRDMYVDQELDINRLSDY
DVDHIVPQSFLKDDSIDNKVLTRSDKNRGKSDNVPSEEVVKKMKNYWRQLLNAKLITQRKEDNLIKAERGGLSELD
KAGFIKRQLVETRQITKHVAQILDSRMNTKYDENDKLIREVKVITLKSKLVSDERKDFQFYKVREINNYHHAHDAY
LNAVVGTALIKKYPKLESEFVYGDYKVYDVRKMIAKSEQEIGKATAKYFFYSNIMNFFKTEITLANGEIRKRPLIE
TNGETGEIVWDKGRDFATVRKVLSMPQVNIVKKTEVQTGGESKESILPKRNSDKLIARKKDWDPKKYGGFDSPTVA
YSVLVVAKVEKGKSKKLKSVKELLGITIMERSSFEKNPIDFLEAKGYKEVKKDLIIKLPKYSLFELENGRKRMLAS
AGELQKGNELALPSKYVNFLYLASHYEKLKGSPEDNEQKQLFVEQHKHYLDEIIEQISEFSKRVILADANLDKVLS
AYNKHRDKPIREQAENIIHLFTLINLGAPAAFKYFDTTIDRKRYTSTKEVLDATLIHQSITGLYETRIDLSQLGGD
APAPAPAMVSKGEELFTGVVPILVELDGDVNGHKFSVSGEGEGDATYGKLTLKFICTTGKLPVPWPTLVTT
LTYGVQCFSRYPDHMKQHDFFKSAMPEGYVQERTIFFKDDGNYKTRAEVKFEGDTLVNRIELKGIDFKEDGNILGH
KLEYNYNSHNVYIMADKQKNGIKVNFKIRHNIEDGSVQLADHYQQNTPIGDGPVLLPDNHYLSTQSALSKDPNEKR
DHMVLLEFVTAAGITLGMDELYK
SEQ ID NO: 46
MDKKYSIGLDIGINSVGWAVITDEYKVPSKKEKVLGNTDRHSIKKNLIGALLFDSGETAEATRLKRTARRRYTRRK
NRICYLQEIFSNEMAKVDDSFFHRLEESFLVEEDKKHERHPIFGNIVDEVAYHEKYPTIYHLRKKLVDSTDKADLR
LIYLALAHMIKFRGHFLIEGDLNPDNSDVDKLFIQLVQTYNQLFEENPINASGVDAKAILSARLSKSRRLENLIAQ
LPGEKKNGLEGNLIALSLGLIPNEKSNEDLAEDAKLQLSKDTYDDDLDNLLAQIGDQYADLFLAAKNLSDAILLSD
ILRVNTEITKAPLSASMIKRYDEHHQDLTLLKALVRQQLPEKYKEIFFDQSKNGYAGYIDGGASQEEFYKFIKPIL
EKMDGTEELLVKLNREDLLRKQRTFDNGSIPHQIHLGELHAILRRQEDFYPFLKDNREKIEKILTFRIPYYVGPLA
RGNSRFAWMTRKSEETITPWNFEEVVDKGASAQSFIERMTNEDKNLPNEKVLPKHSLLYEYFTVYNELTKVKYVTE
GMRKPAFLSGEQKKAIVDLLFKINRKVIVKQLKEDYFKKIECFDSVEISGVEDRFNASLGTYHDLLKIIKDKDFLD
NEENEDILEDIVLTLTLFEDREMIEERLKTYAHLFDDKVMKQLKRRRYTGWGRLSRKLINGIRDKQSGKTILDFLK
SDGFANRNFMQLIHDDSLTFKEDIQKAQVSGQGDSLHEHIANLAGSPAIKKGILQTVKVVDELVKVMGRHKPENIV
IEMARENQTTQKGQKNSRERMKRIEEGIKELGSQILKEHPVENTQLQNEKLYLYYLQNGRDMYVDQELDINRLSDY
DVDHIVPQSFLKDDSIDNKVLTRSDKNRGKSDNVPSEEVVKKMKNYWRQLLNAKLITQRKEDNLIKAERGGLSELD
KAGFIKRQLVETRQITKHVAQILDSRMNTKYDENDKLIREVKVITLKSKLVSDERKDFQFYKVREINNYHHAHDAY
LNAVVGTALIKKYPKLESEFVYGDYKVYDVRKMIAKSEQEIGKATAKYFFYSNIMNFFKTEITLANGEIRKRPLIE
TNGETGEIVWDKGRDFATVRKVLSMPQVNIVKKTEVQTGGESKESILPKRNSDKLIARKKDWDPKKYGGFDSPTVA
YSVLVVAKVEKGKSKKLKSVKELLGITIMERSSFEKNPIDFLEAKGYKEVKKDLIIKLPKYSLFELENGRKRMLAS
AGELQKGNELALPSKYVNFLYLASHYEKLKGSPEDNEQKQLFVEQHKHYLDEIIEQISEFSKRVILADANLDKVLS
AYNKHRDKPIREQAENIIHLFTLINLGAPAAFKYFDTTIDRKRYTSTKEVLDATLIHQSITGLYETRIDLSQLGGD
APAPAPAPAMVSKGEELFTGVVPILVELDGDVNGHKFSVSGEGEGDATYGKLTLKFICTTGKLPVPWPTLVTT
LTYGVQCFSRYPDHMKQHDFFKSAMPEGYVQERTIFFKDDGNYKTRAEVKFEGDTLVNRIELKGIDFKEDGNILGH
KLEYNYNSHNVYIMADKQKNGIKVNFKIRHNIEDGSVQLADHYQQNTPIGDGPVLLPDNHYLSTQSALSKDPNEKR
DHMVLLEFVTAAGITLGMDELYK
SEQ ID NO: 47
MDKKYSIGLDIGINSVGWAVITDEYKVPSKKEKVLGNTDRHSIKKNLIGALLFDSGETAEATRLKRTARRRYTRRK
NRICYLQEIFSNEMAKVDDSFFHRLEESFLVEEDKKHERHPIFGNIVDEVAYHEKYPTIYHLRKKLVDSTDKADLR
LIYLALAHMIKFRGHFLIEGDLNPDNSDVDKLFIQLVQTYNQLFEENPINASGVDAKAILSARLSKSRRLENLIAQ
LPGEKKNGLEGNLIALSLGLIPNEKSNEDLAEDAKLQLSKDTYDDDLDNLLAQIGDQYADLFLAAKNLSDAILLSD
ILRVNTEITKAPLSASMIKRYDEHHQDLTLLKALVRQQLPEKYKEIFFDQSKNGYAGYIDGGASQEEFYKFIKPIL
EKMDGTEELLVKLNREDLLRKQRTFDNGSIPHQIHLGELHAILRRQEDFYPFLKDNREKIEKILTFRIPYYVGPLA
RGNSRFAWMTRKSEETITPWNFEEVVDKGASAQSFIERMTNEDKNLPNEKVLPKHSLLYEYFTVYNELTKVKYVTE
GMRKPAFLSGEQKKAIVDLLFKINRKVIVKQLKEDYFKKIECFDSVEISGVEDRFNASLGTYHDLLKIIKDKDFLD
NEENEDILEDIVLTLTLFEDREMIEERLKTYAHLFDDKVMKQLKRRRYTGWGRLSRKLINGIRDKQSGKTILDFLK
SDGFANRNFMQLIHDDSLTFKEDIQKAQVSGQGDSLHEHIANLAGSPAIKKGILQTVKVVDELVKVMGRHKPENIV
IEMARENQTTQKGQKNSRERMKRIEEGIKELGSQILKEHPVENTQLQNEKLYLYYLQNGRDMYVDQELDINRLSDY
DVDHIVPQSFLKDDSIDNKVLTRSDKNRGKSDNVPSEEVVKKMKNYWRQLLNAKLITQRKEDNLIKAERGGLSELD
KAGFIKRQLVETRQITKHVAQILDSRMNTKYDENDKLIREVKVITLKSKLVSDERKDFQFYKVREINNYHHAHDAY
LNAVVGTALIKKYPKLESEFVYGDYKVYDVRKMIAKSEQEIGKATAKYFFYSNIMNFFKTEITLANGEIRKRPLIE
TNGETGEIVWDKGRDFATVRKVLSMPQVNIVKKTEVQTGGESKESILPKRNSDKLIARKKDWDPKKYGGFDSPTVA
YSVLVVAKVEKGKSKKLKSVKELLGITIMERSSFEKNPIDFLEAKGYKEVKKDLIIKLPKYSLFELENGRKRMLAS
AGELQKGNELALPSKYVNFLYLASHYEKLKGSPEDNEQKQLFVEQHKHYLDEIIEQISEFSKRVILADANLDKVLS
AYNKHRDKPIREQAENIIHLFTLINLGAPAAFKYFDTTIDRKRYTSTKEVLDATLIHQSITGLYETRIDLSQLGGD
APAPAPAPAPAMVSKGEELFTGVVPILVELDGDVNGHKFSVSGEGEGDATYGKLTLKFICTTGKLPVPWPTLVTT
LTYGVQCFSRYPDHMKQHDFFKSAMPEGYVQERTIFFKDDGNYKTRAEVKFEGDTLVNRIELKGIDFKEDGNILGH
KLEYNYNSHNVYIMADKQKNGIKVNFKIRHNIEDGSVQLADHYQQNTPIGDGPVLLPDNHYLSTQSALSKDPNEKR
DHMVLLEFVTAAGITLGMDELYK
SEQ ID NO: 48
MDKKYSIGLDIGINSVGWAVITDEYKVPSKKEKVLGNTDRHSIKKNLIGALLFDSGETAEATRLKRTARRRYTRRK
NRICYLQEIFSNEMAKVDDSFFHRLEESFLVEEDKKHERHPIFGNIVDEVAYHEKYPTIYHLRKKLVDSTDKADLR
LIYLALAHMIKFRGHFLIEGDLNPDNSDVDKLFIQLVQTYNQLFEENPINASGVDAKAILSARLSKSRRLENLIAQ
LPGEKKNGLEGNLIALSLGLIPNEKSNEDLAEDAKLQLSKDTYDDDLDNLLAQIGDQYADLFLAAKNLSDAILLSD
ILRVNTEITKAPLSASMIKRYDEHHQDLTLLKALVRQQLPEKYKEIFFDQSKNGYAGYIDGGASQEEFYKFIKPIL
EKMDGTEELLVKLNREDLLRKQRTFDNGSIPHQIHLGELHAILRRQEDFYPFLKDNREKIEKILTFRIPYYVGPLA
RGNSRFAWMTRKSEETITPWNFEEVVDKGASAQSFIERMTNEDKNLPNEKVLPKHSLLYEYFTVYNELTKVKYVTE
GMRKPAFLSGEQKKAIVDLLFKINRKVIVKQLKEDYFKKIECFDSVEISGVEDRFNASLGTYHDLLKIIKDKDFLD
NEENEDILEDIVLTLTLFEDREMIEERLKTYAHLFDDKVMKQLKRRRYTGWGRLSRKLINGIRDKQSGKTILDFLK
SDGFANRNFMQLIHDDSLTFKEDIQKAQVSGQGDSLHEHIANLAGSPAIKKGILQTVKVVDELVKVMGRHKPENIV
IEMARENQTTQKGQKNSRERMKRIEEGIKELGSQILKEHPVENTQLQNEKLYLYYLQNGRDMYVDQELDINRLSDY
DVDHIVPQSFLKDDSIDNKVLTRSDKNRGKSDNVPSEEVVKKMKNYWRQLLNAKLITQRKEDNLIKAERGGLSELD
KAGFIKRQLVETRQITKHVAQILDSRMNTKYDENDKLIREVKVITLKSKLVSDERKDFQFYKVREINNYHHAHDAY
LNAVVGTALIKKYPKLESEFVYGDYKVYDVRKMIAKSEQEIGKATAKYFFYSNIMNFFKTEITLANGEIRKRPLIE
TNGETGEIVWDKGRDFATVRKVLSMPQVNIVKKTEVQTGGESKESILPKRNSDKLIARKKDWDPKKYGGFDSPTVA
YSVLVVAKVEKGKSKKLKSVKELLGITIMERSSFEKNPIDFLEAKGYKEVKKDLIIKLPKYSLFELENGRKRMLAS
AGELQKGNELALPSKYVNFLYLASHYEKLKGSPEDNEQKQLFVEQHKHYLDEIIEQISEFSKRVILADANLDKVLS
AYNKHRDKPIREQAENIIHLFTLINLGAPAAFKYFDTTIDRKRYTSTKEVLDATLIHQSITGLYETRIDLSQLGGD
APAPAPAPAPAPA
MVSKGEELFTGVVPILVELDGDVNGHKFSVSGEGEGDATYGKLTLKFICTTGKLPVPWPTLVTT
LTYGVQCFSRYPDHMKQHDFFKSAMPEGYVQERTIFFKDDGNYKTRAEVKFEGDTLVNRIELKGIDFKEDGNILGH
KLEYNYNSHNVYIMADKQKNGIKVNFKIRHNIEDGSVQLADHYQQNTPIGDGPVLLPDNHYLSTQSALSKDPNEKR
DHMVLLEFVTAAGITLGMDELYK
SEQ ID NO: 49
MDKKYSIGLDIGINSVGWAVITDEYKVPSKKEKVLGNTDRHSIKKNLIGALLFDSGETAEATRLKRTARRRYTRRK
NRICYLQEIFSNEMAKVDDSFFHRLEESFLVEEDKKHERHPIFGNIVDEVAYHEKYPTIYHLRKKLVDSTDKADLR
LIYLALAHMIKFRGHFLIEGDLNPDNSDVDKLFIQLVQTYNQLFEENPINASGVDAKAILSARLSKSRRLENLIAQ
LPGEKKNGLEGNLIALSLGLIPNEKSNEDLAEDAKLQLSKDTYDDDLDNLLAQIGDQYADLFLAAKNLSDAILLSD
ILRVNTEITKAPLSASMIKRYDEHHQDLTLLKALVRQQLPEKYKEIFFDQSKNGYAGYIDGGASQEEFYKFIKPIL
EKMDGTEELLVKLNREDLLRKQRTFDNGSIPHQIHLGELHAILRRQEDFYPFLKDNREKIEKILTFRIPYYVGPLA
RGNSRFAWMTRKSEETITPWNFEEVVDKGASAQSFIERMTNEDKNLPNEKVLPKHSLLYEYFTVYNELTKVKYVTE
GMRKPAFLSGEQKKAIVDLLFKINRKVIVKQLKEDYFKKIECFDSVEISGVEDRFNASLGTYHDLLKIIKDKDFLD
NEENEDILEDIVLTLTLFEDREMIEERLKTYAHLFDDKVMKQLKRRRYTGWGRLSRKLINGIRDKQSGKTILDFLK
SDGFANRNFMQLIHDDSLTFKEDIQKAQVSGQGDSLHEHIANLAGSPAIKKGILQTVKVVDELVKVMGRHKPENIV
IEMARENQTTQKGQKNSRERMKRIEEGIKELGSQILKEHPVENTQLQNEKLYLYYLQNGRDMYVDQELDINRLSDY
DVDHIVPQSFLKDDSIDNKVLTRSDKNRGKSDNVPSEEVVKKMKNYWRQLLNAKLITQRKEDNLIKAERGGLSELD
KAGFIKRQLVETRQITKHVAQILDSRMNTKYDENDKLIREVKVITLKSKLVSDERKDFQFYKVREINNYHHAHDAY
LNAVVGTALIKKYPKLESEFVYGDYKVYDVRKMIAKSEQEIGKATAKYFFYSNIMNFFKTEITLANGEIRKRPLIE
TNGETGEIVWDKGRDFATVRKVLSMPQVNIVKKTEVQTGGESKESILPKRNSDKLIARKKDWDPKKYGGFDSPTVA
YSVLVVAKVEKGKSKKLKSVKELLGITIMERSSFEKNPIDFLEAKGYKEVKKDLIIKLPKYSLFELENGRKRMLAS
AGELQKGNELALPSKYVNFLYLASHYEKLKGSPEDNEQKQLFVEQHKHYLDEIIEQISEFSKRVILADANLDKVLS
AYNKHRDKPIREQAENIIHLFTLINLGAPAAFKYFDTTIDRKRYTSTKEVLDATLIHQSITGLYETRIDLSQLGGD
APAPAPAPAPAPAPA
MVSKGEELFTGVVPILVELDGDVNGHKFSVSGEGEGDATYGKLTLKFICTTGKLPVPWPTLVTT
LTYGVQCFSRYPDHMKQHDFFKSAMPEGYVQERTIFFKDDGNYKTRAEVKFEGDTLVNRIELKGIDFKEDGNILGH
KLEYNYNSHNVYIMADKQKNGIKVNFKIRHNIEDGSVQLADHYQQNTPIGDGPVLLPDNHYLSTQSALSKDPNEKR
DHMVLLEFVTAAGITLGMDELYK
SEQ ID NO: 50
MDKKYSIGLDIGINSVGWAVITDEYKVPSKKEKVLGNTDRHSIKKNLIGALLFDSGETAEATRLKRTARRRYTRRK
NRICYLQEIFSNEMAKVDDSFFHRLEESFLVEEDKKHERHPIFGNIVDEVAYHEKYPTIYHLRKKLVDSTDKADLR
LIYLALAHMIKFRGHFLIEGDLNPDNSDVDKLFIQLVQTYNQLFEENPINASGVDAKAILSARLSKSRRLENLIAQ
LPGEKKNGLEGNLIALSLGLIPNEKSNEDLAEDAKLQLSKDTYDDDLDNLLAQIGDQYADLFLAAKNLSDAILLSD
ILRVNTEITKAPLSASMIKRYDEHHQDLTLLKALVRQQLPEKYKEIFFDQSKNGYAGYIDGGASQEEFYKFIKPIL
EKMDGTEELLVKLNREDLLRKQRTFDNGSIPHQIHLGELHAILRRQEDFYPFLKDNREKIEKILTFRIPYYVGPLA
RGNSRFAWMTRKSEETITPWNFEEVVDKGASAQSFIERMTNEDKNLPNEKVLPKHSLLYEYFTVYNELTKVKYVTE
GMRKPAFLSGEQKKAIVDLLFKINRKVIVKQLKEDYFKKIECFDSVEISGVEDRFNASLGTYHDLLKIIKDKDFLD
NEENEDILEDIVLTLTLFEDREMIEERLKTYAHLFDDKVMKQLKRRRYTGWGRLSRKLINGIRDKQSGKTILDFLK
SDGFANRNFMQLIHDDSLTFKEDIQKAQVSGQGDSLHEHIANLAGSPAIKKGILQTVKVVDELVKVMGRHKPENIV
IEMARENQTTQKGQKNSRERMKRIEEGIKELGSQILKEHPVENTQLQNEKLYLYYLQNGRDMYVDQELDINRLSDY
DVDHIVPQSFLKDDSIDNKVLTRSDKNRGKSDNVPSEEVVKKMKNYWRQLLNAKLITQRKEDNLIKAERGGLSELD
KAGFIKRQLVETRQITKHVAQILDSRMNTKYDENDKLIREVKVITLKSKLVSDERKDFQFYKVREINNYHHAHDAY
LNAVVGTALIKKYPKLESEFVYGDYKVYDVRKMIAKSEQEIGKATAKYFFYSNIMNFFKTEITLANGEIRKRPLIE
TNGETGEIVWDKGRDFATVRKVLSMPQVNIVKKTEVQTGGESKESILPKRNSDKLIARKKDWDPKKYGGFDSPTVA
YSVLVVAKVEKGKSKKLKSVKELLGITIMERSSFEKNPIDFLEAKGYKEVKKDLIIKLPKYSLFELENGRKRMLAS
AGELQKGNELALPSKYVNFLYLASHYEKLKGSPEDNEQKQLFVEQHKHYLDEIIEQISEFSKRVILADANLDKVLS
AYNKHRDKPIREQAENIIHLFTLTNLGAPAAFKYFDTTIDRKRYTSTKEVLDATLIHQSITGLYETRIDLSQLGGD
APAPAPAPAPAPAPAPA
MVSKGEELFTGVVPILVELDGDVNGHKFSVSGEGEGDATYGKLTLKFICTTGKLPVPWPTLVTT
LTYGVQCFSRYPDHMKQHDFFKSAMPEGYVQERTIFFKDDGNYKTRAEVKFEGDTLVNRIELKGIDFKEDGNILGH
KLEYNYNSHNVYIMADKQKNGIKVNFKIRHNIEDGSVQLADHYQQNTPIGDGPVLLPDNHYLSTQSALSKDPNEKR
DHMVLLEFVTAAGITLGMDELYK
SEQ ID NO: 51
MDKKYSIGLDIGINSVGWAVITDEYKVPSKKEKVLGNTDRHSIKKNLIGALLFDSGETAEATRLKRTARRRYTRRK
NRICYLQEIFSNEMAKVDDSFFHRLEESFLVEEDKKHERHPIFGNIVDEVAYHEKYPTIYHLRKKLVDSTDKADLR
LIYLALAHMIKFRGHFLIEGDLNPDNSDVDKLFIQLVQTYNQLFEENPINASGVDAKAILSARLSKSRRLENLIAQ
LPGEKKNGLEGNLIALSLGLIPNEKSNEDLAEDAKLQLSKDTYDDDLDNLLAQIGDQYADLFLAAKNLSDAILLSD
ILRVNTEITKAPLSASMIKRYDEHHQDLTLLKALVRQQLPEKYKEIFFDQSKNGYAGYIDGGASQEEFYKFIKPIL
EKMDGTEELLVKLNREDLLRKQRTFDNGSIPHQIHLGELHAILRRQEDFYPFLKDNREKIEKILTFRIPYYVGPLA
RGNSRFAWMTRKSEETITPWNFEEVVDKGASAQSFIERMTNEDKNLPNEKVLPKHSLLYEYFTVYNELTKVKYVTE
GMRKPAFLSGEQKKAIVDLLFKINRKVIVKQLKEDYFKKIECFDSVEISGVEDRFNASLGTYHDLLKIIKDKDFLD
NEENEDILEDIVLTLTLFEDREMIEERLKTYAHLFDDKVMKQLKRRRYTGWGRLSRKLINGIRDKQSGKTILDFLK
SDGFANRNFMQLIHDDSLTFKEDIQKAQVSGQGDSLHEHIANLAGSPAIKKGILQTVKVVDELVKVMGRHKPENIV
IEMARENQTTQKGQKNSRERMKRIEEGIKELGSQILKEHPVENTQLQNEKLYLYYLQNGRDMYVDQELDINRLSDY
DVDHIVPQSFLKDDSIDNKVLTRSDKNRGKSDNVPSEEVVKKMKNYWRQLLNAKLITQRKEDNLIKAERGGLSELD
KAGFIKRQLVETRQITKHVAQILDSRMNTKYDENDKLIREVKVITLKSKLVSDERKDFQFYKVREINNYHHAHDAY
LNAVVGTALIKKYPKLESEFVYGDYKVYDVRKMIAKSEQEIGKATAKYFFYSNIMNFFKTEITLANGEIRKRPLIE
TNGETGEIVWDKGRDFATVRKVLSMPQVNIVKKTEVQTGGESKESILPKRNSDKLIARKKDWDPKKYGGFDSPTVA
YSVLVVAKVEKGKSKKLKSVKELLGITIMERSSFEKNPIDFLEAKGYKEVKKDLIIKLPKYSLFELENGRKRMLAS
AGELQKGNELALPSKYVNFLYLASHYEKLKGSPEDNEQKQLFVEQHKHYLDEIIEQISEFSKRVILADANLDKVLS
AYNKHRDKPIREQAENIIHLFTLTNLGAPAAFKYFDTTIDRKRYTSTKEVLDATLIHQSITGLYETRIDLSQLGGD
APAPAPAPAPAPAPAPAPA
MVSKGEELFTGVVPILVELDGDVNGHKFSVSGEGEGDATYGKLTLKFICTTGKLPVPWPTLVTT
LTYGVQCFSRYPDHMKQHDFFKSAMPEGYVQERTIFFKDDGNYKTRAEVKFEGDTLVNRIELKGIDFKEDGNILGH
KLEYNYNSHNVYIMADKQKNGIKVNFKIRHNIEDGSVQLADHYQQNTPIGDGPVLLPDNHYLSTQSALSKDPNEKR
DHMVLLEFVTAAGITLGMDELYK
SEQ ID NO: 52
MDKKYSIGLDIGINSVGWAVITDEYKVPSKKEKVLGNTDRHSIKKNLIGALLFDSGETAEATRLKRTARRRYTRRK
NRICYLQEIFSNEMAKVDDSFFHRLEESFLVEEDKKHERHPIFGNIVDEVAYHEKYPTIYHLRKKLVDSTDKADLR
LIYLALAHMIKFRGHFLIEGDLNPDNSDVDKLFIQLVQTYNQLFEENPINASGVDAKAILSARLSKSRRLENLIAQ
LPGEKKNGLEGNLIALSLGLIPNEKSNEDLAEDAKLQLSKDTYDDDLDNLLAQIGDQYADLFLAAKNLSDAILLSD
ILRVNTEITKAPLSASMIKRYDEHHQDLTLLKALVRQQLPEKYKEIFFDQSKNGYAGYIDGGASQEEFYKFIKPIL
EKMDGTEELLVKLNREDLLRKQRTFDNGSIPHQIHLGELHAILRRQEDFYPFLKDNREKIEKILTFRIPYYVGPLA
RGNSRFAWMTRKSEETITPWNFEEVVDKGASAQSFIERMTNEDKNLPNEKVLPKHSLLYEYFTVYNELTKVKYVTE
GMRKPAFLSGEQKKAIVDLLFKINRKVIVKQLKEDYFKKIECFDSVEISGVEDRFNASLGTYHDLLKIIKDKDFLD
NEENEDILEDIVLTLTLFEDREMIEERLKTYAHLFDDKVMKQLKRRRYTGWGRLSRKLINGIRDKQSGKTILDFLK
SDGFANRNFMQLIHDDSLTFKEDIQKAQVSGQGDSLHEHIANLAGSPAIKKGILQTVKVVDELVKVMGRHKPENIV
IEMARENQTTQKGQKNSRERMKRIEEGIKELGSQILKEHPVENTQLQNEKLYLYYLQNGRDMYVDQELDINRLSDY
DVDHIVPQSFLKDDSIDNKVLTRSDKNRGKSDNVPSEEVVKKMKNYWRQLLNAKLITQRKEDNLIKAERGGLSELD
KAGFIKRQLVETRQITKHVAQILDSRMNTKYDENDKLIREVKVITLKSKLVSDERKDFQFYKVREINNYHHAHDAY
LNAVVGTALIKKYPKLESEFVYGDYKVYDVRKMIAKSEQEIGKATAKYFFYSNIMNFFKTEITLANGEIRKRPLIE
TNGETGEIVWDKGRDFATVRKVLSMPQVNIVKKTEVQTGGESKESILPKRNSDKLIARKKDWDPKKYGGFDSPTVA
YSVLVVAKVEKGKSKKLKSVKELLGITIMERSSFEKNPIDFLEAKGYKEVKKDLIIKLPKYSLFELENGRKRMLAS
AGELQKGNELALPSKYVNFLYLASHYEKLKGSPEDNEQKQLFVEQHKHYLDEIIEQISEFSKRVILADANLDKVLS
AYNKHRDKPIREQAENIIHLFTLTNLGAPAAFKYFDTTIDRKRYTSTKEVLDATLIHQSITGLYETRIDLSQLGGD
APAPAPAPAPAPAPAPAPAPA
MVSKGEELFTGVVPILVELDGDVNGHKFSVSGEGEGDATYGKLTLKFICTTGKLPVPWPTLVTT
LTYGVQCFSRYPDHMKQHDFFKSAMPEGYVQERTIFFKDDGNYKTRAEVKFEGDTLVNRIELKGIDFKEDGNILGH
KLEYNYNSHNVYIMADKQKNGIKVNFKIRHNIEDGSVQLADHYQQNTPIGDGPVLLPDNHYLSTQSALSKDPNEKR
DHMVLLEFVTAAGITLGMDELYK
SEQ ID NO: 53
MDKKYSIGLDIGINSVGWAVITDEYKVPSKKEKVLGNTDRHSIKKNLIGALLFDSGETAEATRLKRTARRRYTRRK
NRICYLQEIFSNEMAKVDDSFFHRLEESFLVEEDKKHERHPIFGNIVDEVAYHEKYPTIYHLRKKLVDSTDKADLR
LIYLALAHMIKFRGHFLIEGDLNPDNSDVDKLFIQLVQTYNQLFEENPINASGVDAKAILSARLSKSRRLENLIAQ
LPGEKKNGLEGNLIALSLGLIPNEKSNEDLAEDAKLQLSKDTYDDDLDNLLAQIGDQYADLFLAAKNLSDAILLSD
ILRVNTEITKAPLSASMIKRYDEHHQDLTLLKALVRQQLPEKYKEIFFDQSKNGYAGYIDGGASQEEFYKFIKPIL
EKMDGTEELLVKLNREDLLRKQRTFDNGSIPHQIHLGELHAILRRQEDFYPFLKDNREKIEKILTFRIPYYVGPLA
RGNSRFAWMTRKSEETITPWNFEEVVDKGASAQSFIERMTNEDKNLPNEKVLPKHSLLYEYFTVYNELTKVKYVTE
GMRKPAFLSGEQKKAIVDLLFKINRKVIVKQLKEDYFKKIECFDSVEISGVEDRFNASLGTYHDLLKIIKDKDFLD
NEENEDILEDIVLTLTLFEDREMIEERLKTYAHLFDDKVMKQLKRRRYTGWGRLSRKLINGIRDKQSGKTILDFLK
SDGFANRNFMQLIHDDSLTFKEDIQKAQVSGQGDSLHEHIANLAGSPAIKKGILQTVKVVDELVKVMGRHKPENIV
IEMARENQTTQKGQKNSRERMKRIEEGIKELGSQILKEHPVENTQLQNEKLYLYYLQNGRDMYVDQELDINRLSDY
DVDHIVPQSFLKDDSIDNKVLTRSDKNRGKSDNVPSEEVVKKMKNYWRQLLNAKLITQRKEDNLIKAERGGLSELD
KAGFIKRQLVETRQITKHVAQILDSRMNTKYDENDKLIREVKVITLKSKLVSDERKDFQFYKVREINNYHHAHDAY
LNAVVGTALIKKYPKLESEFVYGDYKVYDVRKMIAKSEQEIGKATAKYFFYSNIMNFFKTEITLANGEIRKRPLIE
TNGETGEIVWDKGRDFATVRKVLSMPQVNIVKKTEVQTGGESKESILPKRNSDKLIARKKDWDPKKYGGFDSPTVA
YSVLVVAKVEKGKSKKLKSVKELLGITIMERSSFEKNPIDFLEAKGYKEVKKDLIIKLPKYSLFELENGRKRMLAS
AGELQKGNELALPSKYVNFLYLASHYEKLKGSPEDNEQKQLFVEQHKHYLDEIIEQISEFSKRVILADANLDKVLS
AYNKHRDKPIREQAENIIHLFTLTNLGAPAAFKYFDTTIDRKRYTSTKEVLDATLIHQSITGLYETRIDLSQLGGD
APAPAPAPAPAPAPAPAPAPAPA
MVSKGEELFTGVVPILVELDGDVNGHKFSVSGEGEGDATYGKLTLKFICTTGKLPVPWPTLVTT
LTYGVQCFSRYPDHMKQHDFFKSAMPEGYVQERTIFFKDDGNYKTRAEVKFEGDTLVNRIELKGIDFKEDGNILGH
KLEYNYNSHNVYIMADKQKNGIKVNFKIRHNIEDGSVQLADHYQQNTPIGDGPVLLPDNHYLSTQSALSKDPNEKR
DHMVLLEFVTAAGITLGMDELYK
SEQ ID NO: 54
MDKKYSIGLDIGINSVGWAVITDEYKVPSKKEKVLGNTDRHSIKKNLIGALLFDSGETAEATRLKRTARRRYTRRK
NRICYLQEIFSNEMAKVDDSFFHRLEESFLVEEDKKHERHPIFGNIVDEVAYHEKYPTIYHLRKKLVDSTDKADLR
LIYLALAHMIKFRGHFLIEGDLNPDNSDVDKLFIQLVQTYNQLFEENPINASGVDAKAILSARLSKSRRLENLIAQ
LPGEKKNGLEGNLIALSLGLIPNEKSNEDLAEDAKLQLSKDTYDDDLDNLLAQIGDQYADLFLAAKNLSDAILLSD
ILRVNTEITKAPLSASMIKRYDEHHQDLTLLKALVRQQLPEKYKEIFFDQSKNGYAGYIDGGASQEEFYKFIKPIL
EKMDGTEELLVKLNREDLLRKQRTFDNGSIPHQIHLGELHAILRRQEDFYPFLKDNREKIEKILTFRIPYYVGPLA
RGNSRFAWMTRKSEETITPWNFEEVVDKGASAQSFIERMTNEDKNLPNEKVLPKHSLLYEYFTVYNELTKVKYVTE
GMRKPAFLSGEQKKAIVDLLFKINRKVIVKQLKEDYFKKIECFDSVEISGVEDRFNASLGTYHDLLKIIKDKDFLD
NEENEDILEDIVLTLTLFEDREMIEERLKTYAHLFDDKVMKQLKRRRYTGWGRLSRKLINGIRDKQSGKTILDFLK
SDGFANRNFMQLIHDDSLTFKEDIQKAQVSGQGDSLHEHIANLAGSPAIKKGILQTVKVVDELVKVMGRHKPENIV
IEMARENQTTQKGQKNSRERMKRIEEGIKELGSQILKEHPVENTQLQNEKLYLYYLQNGRDMYVDQELDINRLSDY
DVDHIVPQSFLKDDSIDNKVLTRSDKNRGKSDNVPSEEVVKKMKNYWRQLLNAKLITQRKEDNLIKAERGGLSELD
KAGFIKRQLVETRQITKHVAQILDSRMNTKYDENDKLIREVKVITLKSKLVSDERKDFQFYKVREINNYHHAHDAY
LNAVVGTALIKKYPKLESEFVYGDYKVYDVRKMIAKSEQEIGKATAKYFFYSNIMNFFKTEITLANGEIRKRPLIE
TNGETGEIVWDKGRDFATVRKVLSMPQVNIVKKTEVQTGGESKESILPKRNSDKLIARKKDWDPKKYGGFDSPTVA
YSVLVVAKVEKGKSKKLKSVKELLGITIMERSSFEKNPIDFLEAKGYKEVKKDLIIKLPKYSLFELENGRKRMLAS
AGELQKGNELALPSKYVNFLYLASHYEKLKGSPEDNEQKQLFVEQHKHYLDEIIEQISEFSKRVILADANLDKVLS
AYNKHRDKPIREQAENIIHLFTLINLGAPAAFKYFDTTIDRKRYTSTKEVLDATLIHQSITGLYETRIDLSQLGGD
APAPAPAPAPAPAPAPAPAPAPAPA
MVSKGEELFTGVVPILVELDGDVNGHKFSVSGEGEGDATYGKLTLKFICTTGKLPVPWPTLVTT
LTYGVQCFSRYPDHMKQHDFFKSAMPEGYVQERTIFFKDDGNYKTRAEVKFEGDTLVNRIELKGIDFKEDGNILGH
KLEYNYNSHNVYIMADKQKNGIKVNFKIRHNIEDGSVQLADHYQQNTPIGDGPVLLPDNHYLSTQSALSKDPNEKR
DHMVLLEFVTAAGITLGMDELYK
SEQ ID NO: 55
MDKKYSIGLDIGINSVGWAVITDEYKVPSKKEKVLGNTDRHSIKKNLIGALLFDSGETAEATRLKRTARRRYTRRK
NRICYLQEIFSNEMAKVDDSFFHRLEESFLVEEDKKHERHPIFGNIVDEVAYHEKYPTIYHLRKKLVDSTDKADLR
LIYLALAHMIKFRGHFLIEGDLNPDNSDVDKLFIQLVQTYNQLFEENPINASGVDAKAILSARLSKSRRLENLIAQ
LPGEKKNGLEGNLIALSLGLIPNEKSNEDLAEDAKLQLSKDTYDDDLDNLLAQIGDQYADLFLAAKNLSDAILLSD
ILRVNTEITKAPLSASMIKRYDEHHQDLTLLKALVRQQLPEKYKEIFFDQSKNGYAGYIDGGASQEEFYKFIKPIL
EKMDGTEELLVKLNREDLLRKQRTFDNGSIPHQIHLGELHAILRRQEDFYPFLKDNREKIEKILTFRIPYYVGPLA
RGNSRFAWMTRKSEETITPWNFEEVVDKGASAQSFIERMTNEDKNLPNEKVLPKHSLLYEYFTVYNELTKVKYVTE
GMRKPAFLSGEQKKAIVDLLFKINRKVIVKQLKEDYFKKIECFDSVEISGVEDRFNASLGTYHDLLKIIKDKDFLD
NEENEDILEDIVLTLTLFEDREMIEERLKTYAHLFDDKVMKQLKRRRYTGWGRLSRKLINGIRDKQSGKTILDFLK
SDGFANRNFMQLIHDDSLTFKEDIQKAQVSGQGDSLHEHIANLAGSPAIKKGILQTVKVVDELVKVMGRHKPENIV
IEMARENQTTQKGQKNSRERMKRIEEGIKELGSQILKEHPVENTQLQNEKLYLYYLQNGRDMYVDQELDINRLSDY
DVDHIVPQSFLKDDSIDNKVLTRSDKNRGKSDNVPSEEVVKKMKNYWRQLLNAKLITQRKEDNLIKAERGGLSELD
KAGFIKRQLVETRQITKHVAQILDSRMNTKYDENDKLIREVKVITLKSKLVSDERKDFQFYKVREINNYHHAHDAY
LNAVVGTALIKKYPKLESEFVYGDYKVYDVRKMIAKSEQEIGKATAKYFFYSNIMNFFKTEITLANGEIRKRPLIE
TNGETGEIVWDKGRDFATVRKVLSMPQVNIVKKTEVQTGGESKESILPKRNSDKLIARKKDWDPKKYGGFDSPTVA
YSVLVVAKVEKGKSKKLKSVKELLGITIMERSSFEKNPIDFLEAKGYKEVKKDLIIKLPKYSLFELENGRKRMLAS
AGELQKGNELALPSKYVNFLYLASHYEKLKGSPEDNEQKQLFVEQHKHYLDEIIEQISEFSKRVILADANLDKVLS
AYNKHRDKPIREQAENIIHLFTLINLGAPAAFKYFDTTIDRKRYTSTKEVLDATLIHQSITGLYETRIDLSQLGGD
APAPAPAPAPAPAPAPAPAPAPAPAPA
MVSKGEELFTGVVPILVELDGDVNGHKFSVSGEGEGDATYGKLTLKFICTTGKLPVPWPTLVTT
LTYGVQCFSRYPDHMKQHDFFKSAMPEGYVQERTIFFKDDGNYKTRAEVKFEGDTLVNRIELKGIDFKEDGNILGH
KLEYNYNSHNVYIMADKQKNGIKVNFKIRHNIEDGSVQLADHYQQNTPIGDGPVLLPDNHYLSTQSALSKDPNEKR
DHMVLLEFVTAAGITLGMDELYK
SEQ ID NO: 56
MDKKYSIGLDIGINSVGWAVITDEYKVPSKKEKVLGNTDRHSIKKNLIGALLFDSGETAEATRLKRTARRRYTRRK
NRICYLQEIFSNEMAKVDDSFFHRLEESFLVEEDKKHERHPIFGNIVDEVAYHEKYPTIYHLRKKLVDSTDKADLR
LIYLALAHMIKFRGHFLIEGDLNPDNSDVDKLFIQLVQTYNQLFEENPINASGVDAKAILSARLSKSRRLENLIAQ
LPGEKKNGLEGNLIALSLGLIPNEKSNEDLAEDAKLQLSKDTYDDDLDNLLAQIGDQYADLFLAAKNLSDAILLSD
ILRVNTEITKAPLSASMIKRYDEHHQDLTLLKALVRQQLPEKYKEIFFDQSKNGYAGYIDGGASQEEFYKFIKPIL
EKMDGTEELLVKLNREDLLRKQRTFDNGSIPHQIHLGELHAILRRQEDFYPFLKDNREKIEKILTFRIPYYVGPLA
RGNSRFAWMTRKSEETITPWNFEEVVDKGASAQSFIERMTNEDKNLPNEKVLPKHSLLYEYFTVYNELTKVKYVTE
GMRKPAFLSGEQKKAIVDLLFKINRKVIVKQLKEDYFKKIECFDSVEISGVEDRFNASLGTYHDLLKIIKDKDFLD
NEENEDILEDIVLTLTLFEDREMIEERLKTYAHLFDDKVMKQLKRRRYTGWGRLSRKLINGIRDKQSGKTILDFLK
SDGFANRNFMQLIHDDSLTFKEDIQKAQVSGQGDSLHEHIANLAGSPAIKKGILQTVKVVDELVKVMGRHKPENIV
IEMARENQTTQKGQKNSRERMKRIEEGIKELGSQILKEHPVENTQLQNEKLYLYYLQNGRDMYVDQELDINRLSDY
DVDHIVPQSFLKDDSIDNKVLTRSDKNRGKSDNVPSEEVVKKMKNYWRQLLNAKLITQRKEDNLIKAERGGLSELD
KAGFIKRQLVETRQITKHVAQILDSRMNTKYDENDKLIREVKVITLKSKLVSDERKDFQFYKVREINNYHHAHDAY
LNAVVGTALIKKYPKLESEFVYGDYKVYDVRKMIAKSEQEIGKATAKYFFYSNIMNFFKTEITLANGEIRKRPLIE
TNGETGEIVWDKGRDFATVRKVLSMPQVNIVKKTEVQTGGESKESILPKRNSDKLIARKKDWDPKKYGGFDSPTVA
YSVLVVAKVEKGKSKKLKSVKELLGITIMERSSFEKNPIDFLEAKGYKEVKKDLIIKLPKYSLFELENGRKRMLAS
AGELQKGNELALPSKYVNFLYLASHYEKLKGSPEDNEQKQLFVEQHKHYLDEIIEQISEFSKRVILADANLDKVLS
AYNKHRDKPIREQAENIIHLFTLINLGAPAAFKYFDTTIDRKRYTSTKEVLDATLIHQSITGLYETRIDLSQLGGD
APAPAPAPAPAPAPAPAPAPAPAPAPAPA
MVSKGEELFTGVVPILVELDGDVNGHKFSVSGEGEGDATYGKLTLKFICTTGKLPVPWPTLVTT
LTYGVQCFSRYPDHMKQHDFFKSAMPEGYVQERTIFFKDDGNYKTRAEVKFEGDTLVNRIELKGIDFKEDGNILGH
KLEYNYNSHNVYIMADKQKNGIKVNFKIRHNIEDGSVQLADHYQQNTPIGDGPVLLPDNHYLSTQSALSKDPNEKR
DHMVLLEFVTAAGITLGMDELYK
SEQ ID NO: 57
MDKKYSIGLDIGINSVGWAVITDEYKVPSKKEKVLGNTDRHSIKKNLIGALLFDSGETAEATRLKRTARRRYTRRK
NRICYLQEIFSNEMAKVDDSFFHRLEESFLVEEDKKHERHPIFGNIVDEVAYHEKYPTIYHLRKKLVDSTDKADLR
LIYLALAHMIKFRGHFLIEGDLNPDNSDVDKLFIQLVQTYNQLFEENPINASGVDAKAILSARLSKSRRLENLIAQ
LPGEKKNGLEGNLIALSLGLIPNEKSNEDLAEDAKLQLSKDTYDDDLDNLLAQIGDQYADLFLAAKNLSDAILLSD
ILRVNTEITKAPLSASMIKRYDEHHQDLTLLKALVRQQLPEKYKEIFFDQSKNGYAGYIDGGASQEEFYKFIKPIL
EKMDGTEELLVKLNREDLLRKQRTFDNGSIPHQIHLGELHAILRRQEDFYPFLKDNREKIEKILTFRIPYYVGPLA
RGNSRFAWMTRKSEETITPWNFEEVVDKGASAQSFIERMTNEDKNLPNEKVLPKHSLLYEYFTVYNELTKVKYVTE
GMRKPAFLSGEQKKAIVDLLFKINRKVIVKQLKEDYFKKIECFDSVEISGVEDRFNASLGTYHDLLKIIKDKDFLD
NEENEDILEDIVLTLTLFEDREMIEERLKTYAHLFDDKVMKQLKRRRYTGWGRLSRKLINGIRDKQSGKTILDFLK
SDGFANRNFMQLIHDDSLTFKEDIQKAQVSGQGDSLHEHIANLAGSPAIKKGILQTVKVVDELVKVMGRHKPENIV
IEMARENQTTQKGQKNSRERMKRIEEGIKELGSQILKEHPVENTQLQNEKLYLYYLQNGRDMYVDQELDINRLSDY
DVDHIVPQSFLKDDSIDNKVLTRSDKNRGKSDNVPSEEVVKKMKNYWRQLLNAKLITQRKEDNLIKAERGGLSELD
KAGFIKRQLVETRQITKHVAQILDSRMNTKYDENDKLIREVKVITLKSKLVSDERKDFQFYKVREINNYHHAHDAY
LNAVVGTALIKKYPKLESEFVYGDYKVYDVRKMIAKSEQEIGKATAKYFFYSNIMNFFKTEITLANGEIRKRPLIE
TNGETGEIVWDKGRDFATVRKVLSMPQVNIVKKTEVQTGGESKESILPKRNSDKLIARKKDWDPKKYGGFDSPTVA
YSVLVVAKVEKGKSKKLKSVKELLGITIMERSSFEKNPIDFLEAKGYKEVKKDLIIKLPKYSLFELENGRKRMLAS
AGELQKGNELALPSKYVNFLYLASHYEKLKGSPEDNEQKQLFVEQHKHYLDEIIEQISEFSKRVILADANLDKVLS
AYNKHRDKPIREQAENIIHLFTLINLGAPAAFKYFDTTIDRKRYTSTKEVLDATLIHQSITGLYETRIDLSQLGGD
XPMVSKGEELFTGVVPILVELDGDVNGHKFSVSGEGEGDATYGKLTLKFICTTGKLPVPWPTLVTT
LTYGVQCFSRYPDHMKQHDFFKSAMPEGYVQERTIFFKDDGNYKTRAEVKFEGDTLVNRIELKGIDFKEDGNILGH
KLEYNYNSHNVYIMADKQKNGIKVNFKIRHNIEDGSVQLADHYQQNTPIGDGPVLLPDNHYLSTQSALSKDPNEKR
DHMVLLEFVTAAGITLGMDELYK
SEQ ID NO: 58
MDKKYSIGLDIGINSVGWAVITDEYKVPSKKEKVLGNTDRHSIKKNLIGALLFDSGETAEATRLKRTARRRYTRRK
NRICYLQEIFSNEMAKVDDSFFHRLEESFLVEEDKKHERHPIFGNIVDEVAYHEKYPTIYHLRKKLVDSTDKADLR
LIYLALAHMIKFRGHFLIEGDLNPDNSDVDKLFIQLVQTYNQLFEENPINASGVDAKAILSARLSKSRRLENLIAQ
LPGEKKNGLEGNLIALSLGLIPNEKSNEDLAEDAKLQLSKDTYDDDLDNLLAQIGDQYADLFLAAKNLSDAILLSD
ILRVNTEITKAPLSASMIKRYDEHHQDLTLLKALVRQQLPEKYKEIFFDQSKNGYAGYIDGGASQEEFYKFIKPIL
EKMDGTEELLVKLNREDLLRKQRTFDNGSIPHQIHLGELHAILRRQEDFYPFLKDNREKIEKILTFRIPYYVGPLA
RGNSRFAWMTRKSEETITPWNFEEVVDKGASAQSFIERMTNEDKNLPNEKVLPKHSLLYEYFTVYNELTKVKYVTE
GMRKPAFLSGEQKKAIVDLLFKINRKVIVKQLKEDYFKKIECFDSVEISGVEDRFNASLGTYHDLLKIIKDKDFLD
NEENEDILEDIVLTLTLFEDREMIEERLKTYAHLFDDKVMKQLKRRRYTGWGRLSRKLINGIRDKQSGKTILDFLK
SDGFANRNFMQLIHDDSLTFKEDIQKAQVSGQGDSLHEHIANLAGSPAIKKGILQTVKVVDELVKVMGRHKPENIV
IEMARENQTTQKGQKNSRERMKRIEEGIKELGSQILKEHPVENTQLQNEKLYLYYLQNGRDMYVDQELDINRLSDY
DVDHIVPQSFLKDDSIDNKVLTRSDKNRGKSDNVPSEEVVKKMKNYWRQLLNAKLITQRKEDNLIKAERGGLSELD
KAGFIKRQLVETRQITKHVAQILDSRMNTKYDENDKLIREVKVITLKSKLVSDERKDFQFYKVREINNYHHAHDAY
LNAVVGTALIKKYPKLESEFVYGDYKVYDVRKMIAKSEQEIGKATAKYFFYSNIMNFFKTEITLANGEIRKRPLIE
TNGETGEIVWDKGRDFATVRKVLSMPQVNIVKKTEVQTGGESKESILPKRNSDKLIARKKDWDPKKYGGFDSPTVA
YSVLVVAKVEKGKSKKLKSVKELLGITIMERSSFEKNPIDFLEAKGYKEVKKDLIIKLPKYSLFELENGRKRMLAS
AGELQKGNELALPSKYVNFLYLASHYEKLKGSPEDNEQKQLFVEQHKHYLDEIIEQISEFSKRVILADANLDKVLS
AYNKHRDKPIREQAENIIHLFTLINLGAPAAFKYFDTTIDRKRYTSTKEVLDATLIHQSITGLYETRIDLSQLGGD
XPXPFMVSKGEELFTGVVPILVELDGDVNGHKFSVSGEGEGDATYGKLTLKFICTTGKLPVPWPTLVTT
LTYGVQCFSRYPDHMKQHDFFKSAMPEGYVQERTIFFKDDGNYKTRAEVKFEGDTLVNRIELKGIDFKEDGNILGH
KLEYNYNSHNVYIMADKQKNGIKVNFKIRHNIEDGSVQLADHYQQNTPIGDGPVLLPDNHYLSTQSALSKDPNEKR
DHMVLLEFVTAAGITLGMDELYK
SEQ ID NO: 59
MDKKYSIGLDIGINSVGWAVITDEYKVPSKKEKVLGNTDRHSIKKNLIGALLFDSGETAEATRLKRTARRRYTRRK
NRICYLQEIFSNEMAKVDDSFFHRLEESFLVEEDKKHERHPIFGNIVDEVAYHEKYPTIYHLRKKLVDSTDKADLR
LIYLALAHMIKFRGHFLIEGDLNPDNSDVDKLFIQLVQTYNQLFEENPINASGVDAKAILSARLSKSRRLENLIAQ
LPGEKKNGLEGNLIALSLGLIPNEKSNEDLAEDAKLQLSKDTYDDDLDNLLAQIGDQYADLFLAAKNLSDAILLSD
ILRVNTEITKAPLSASMIKRYDEHHQDLTLLKALVRQQLPEKYKEIFFDQSKNGYAGYIDGGASQEEFYKFIKPIL
EKMDGTEELLVKLNREDLLRKQRTFDNGSIPHQIHLGELHAILRRQEDFYPFLKDNREKIEKILTFRIPYYVGPLA
RGNSRFAWMTRKSEETITPWNFEEVVDKGASAQSFIERMTNEDKNLPNEKVLPKHSLLYEYFTVYNELTKVKYVTE
GMRKPAFLSGEQKKAIVDLLFKINRKVIVKQLKEDYFKKIECFDSVEISGVEDRFNASLGTYHDLLKIIKDKDFLD
NEENEDILEDIVLTLTLFEDREMIEERLKTYAHLFDDKVMKQLKRRRYTGWGRLSRKLINGIRDKQSGKTILDFLK
SDGFANRNFMQLIHDDSLTFKEDIQKAQVSGQGDSLHEHIANLAGSPAIKKGILQTVKVVDELVKVMGRHKPENIV
IEMARENQTTQKGQKNSRERMKRIEEGIKELGSQILKEHPVENTQLQNEKLYLYYLQNGRDMYVDQELDINRLSDY
DVDHIVPQSFLKDDSIDNKVLTRSDKNRGKSDNVPSEEVVKKMKNYWRQLLNAKLITQRKEDNLIKAERGGLSELD
KAGFIKRQLVETRQITKHVAQILDSRMNTKYDENDKLIREVKVITLKSKLVSDERKDFQFYKVREINNYHHAHDAY
LNAVVGTALIKKYPKLESEFVYGDYKVYDVRKMIAKSEQEIGKATAKYFFYSNIMNFFKTEITLANGEIRKRPLIE
TNGETGEIVWDKGRDFATVRKVLSMPQVNIVKKTEVQTGGESKESILPKRNSDKLIARKKDWDPKKYGGFDSPTVA
YSVLVVAKVEKGKSKKLKSVKELLGITIMERSSFEKNPIDFLEAKGYKEVKKDLIIKLPKYSLFELENGRKRMLAS
AGELQKGNELALPSKYVNFLYLASHYEKLKGSPEDNEQKQLFVEQHKHYLDEIIEQISEFSKRVILADANLDKVLS
AYNKHRDKPIREQAENIIHLFTLINLGAPAAFKYFDTTIDRKRYTSTKEVLDATLIHQSITGLYETRIDLSQLGGD
XPXPXPMVSKGEELFTGVVPILVELDGDVNGHKFSVSGEGEGDATYGKLTLKFICTTGKLPVPWPTLVTT
LTYGVQCFSRYPDHMKQHDFFKSAMPEGYVQERTIFFKDDGNYKTRAEVKFEGDTLVNRIELKGIDFKEDGNILGH
KLEYNYNSHNVYIMADKQKNGIKVNFKIRHNIEDGSVQLADHYQQNTPIGDGPVLLPDNHYLSTQSALSKDPNEKR
DHMVLLEFVTAAGITLGMDELYK
SEQ ID NO: 60
MDKKYSIGLDIGINSVGWAVITDEYKVPSKKEKVLGNTDRHSIKKNLIGALLFDSGETAEATRLKRTARRRYTRRK
NRICYLQEIFSNEMAKVDDSFFHRLEESFLVEEDKKHERHPIFGNIVDEVAYHEKYPTIYHLRKKLVDSTDKADLR
LIYLALAHMIKFRGHFLIEGDLNPDNSDVDKLFIQLVQTYNQLFEENPINASGVDAKAILSARLSKSRRLENLIAQ
LPGEKKNGLEGNLIALSLGLIPNEKSNEDLAEDAKLQLSKDTYDDDLDNLLAQIGDQYADLFLAAKNLSDAILLSD
ILRVNTEITKAPLSASMIKRYDEHHQDLTLLKALVRQQLPEKYKEIFFDQSKNGYAGYIDGGASQEEFYKFIKPIL
EKMDGTEELLVKLNREDLLRKQRTFDNGSIPHQIHLGELHAILRRQEDFYPFLKDNREKIEKILTFRIPYYVGPLA
RGNSRFAWMTRKSEETITPWNFEEVVDKGASAQSFIERMTNEDKNLPNEKVLPKHSLLYEYFTVYNELTKVKYVTE
GMRKPAFLSGEQKKAIVDLLFKINRKVIVKQLKEDYFKKIECFDSVEISGVEDRFNASLGTYHDLLKIIKDKDFLD
NEENEDILEDIVLTLTLFEDREMIEERLKTYAHLFDDKVMKQLKRRRYTGWGRLSRKLINGIRDKQSGKTILDFLK
SDGFANRNFMQLIHDDSLTFKEDIQKAQVSGQGDSLHEHIANLAGSPAIKKGILQTVKVVDELVKVMGRHKPENIV
IEMARENQTTQKGQKNSRERMKRIEEGIKELGSQILKEHPVENTQLQNEKLYLYYLQNGRDMYVDQELDINRLSDY
DVDHIVPQSFLKDDSIDNKVLTRSDKNRGKSDNVPSEEVVKKMKNYWRQLLNAKLITQRKEDNLIKAERGGLSELD
KAGFIKRQLVETRQITKHVAQILDSRMNTKYDENDKLIREVKVITLKSKLVSDERKDFQFYKVREINNYHHAHDAY
LNAVVGTALIKKYPKLESEFVYGDYKVYDVRKMIAKSEQEIGKATAKYFFYSNIMNFFKTEITLANGEIRKRPLIE
TNGETGEIVWDKGRDFATVRKVLSMPQVNIVKKTEVQTGGESKESILPKRNSDKLIARKKDWDPKKYGGFDSPTVA
YSVLVVAKVEKGKSKKLKSVKELLGITIMERSSFEKNPIDFLEAKGYKEVKKDLIIKLPKYSLFELENGRKRMLAS
AGELQKGNELALPSKYVNFLYLASHYEKLKGSPEDNEQKQLFVEQHKHYLDEIIEQISEFSKRVILADANLDKVLS
AYNKHRDKPIREQAENIIHLFTLINLGAPAAFKYFDTTIDRKRYTSTKEVLDATLIHQSITGLYETRIDLSQLGGD
XPXPXPXPMVSKGEELFTGVVPILVELDGDVNGHKFSVSGEGEGDATYGKLTLKFICTTGKLPVPWPTLVTT
LTYGVQCFSRYPDHMKQHDFFKSAMPEGYVQERTIFFKDDGNYKTRAEVKFEGDTLVNRIELKGIDFKEDGNILGH
KLEYNYNSHNVYIMADKQKNGIKVNFKIRHNIEDGSVQLADHYQQNTPIGDGPVLLPDNHYLSTQSALSKDPNEKR
DHMVLLEFVTAAGITLGMDELYK
SEQ ID NO: 61
MDKKYSIGLDIGINSVGWAVITDEYKVPSKKEKVLGNTDRHSIKKNLIGALLFDSGETAEATRLKRTARRRYTRRK
NRICYLQEIFSNEMAKVDDSFFHRLEESFLVEEDKKHERHPIFGNIVDEVAYHEKYPTIYHLRKKLVDSTDKADLR
LIYLALAHMIKFRGHFLIEGDLNPDNSDVDKLFIQLVQTYNQLFEENPINASGVDAKAILSARLSKSRRLENLIAQ
LPGEKKNGLEGNLIALSLGLIPNEKSNEDLAEDAKLQLSKDTYDDDLDNLLAQIGDQYADLFLAAKNLSDAILLSD
ILRVNTEITKAPLSASMIKRYDEHHQDLTLLKALVRQQLPEKYKEIFFDQSKNGYAGYIDGGASQEEFYKFIKPIL
EKMDGTEELLVKLNREDLLRKQRTFDNGSIPHQIHLGELHAILRRQEDFYPFLKDNREKIEKILTFRIPYYVGPLA
RGNSRFAWMTRKSEETITPWNFEEVVDKGASAQSFIERMTNEDKNLPNEKVLPKHSLLYEYFTVYNELTKVKYVTE
GMRKPAFLSGEQKKAIVDLLFKINRKVIVKQLKEDYFKKIECFDSVEISGVEDRFNASLGTYHDLLKIIKDKDFLD
NEENEDILEDIVLTLTLFEDREMIEERLKTYAHLFDDKVMKQLKRRRYTGWGRLSRKLINGIRDKQSGKTILDFLK
SDGFANRNFMQLIHDDSLTFKEDIQKAQVSGQGDSLHEHIANLAGSPAIKKGILQTVKVVDELVKVMGRHKPENIV
IEMARENQTTQKGQKNSRERMKRIEEGIKELGSQILKEHPVENTQLQNEKLYLYYLQNGRDMYVDQELDINRLSDY
DVDHIVPQSFLKDDSIDNKVLTRSDKNRGKSDNVPSEEVVKKMKNYWRQLLNAKLITQRKEDNLIKAERGGLSELD
KAGFIKRQLVETRQITKHVAQILDSRMNTKYDENDKLIREVKVITLKSKLVSDERKDFQFYKVREINNYHHAHDAY
LNAVVGTALIKKYPKLESEFVYGDYKVYDVRKMIAKSEQEIGKATAKYFFYSNIMNFFKTEITLANGEIRKRPLIE
TNGETGEIVWDKGRDFATVRKVLSMPQVNIVKKTEVQTGGESKESILPKRNSDKLIARKKDWDPKKYGGFDSPTVA
YSVLVVAKVEKGKSKKLKSVKELLGITIMERSSFEKNPIDFLEAKGYKEVKKDLIIKLPKYSLFELENGRKRMLAS
AGELQKGNELALPSKYVNFLYLASHYEKLKGSPEDNEQKQLFVEQHKHYLDEIIEQISEFSKRVILADANLDKVLS
AYNKHRDKPIREQAENIIHLFTLINLGAPAAFKYFDTTIDRKRYTSTKEVLDATLIHQSITGLYETRIDLSQLGGD
XPXPXPXPXPMVSKGEELFTGVVPILVELDGDVNGHKFSVSGEGEGDATYGKLTLKFICTTGKLPVPWPTLVTT
LTYGVQCFSRYPDHMKQHDFFKSAMPEGYVQERTIFFKDDGNYKTRAEVKFEGDTLVNRIELKGIDFKEDGNILGH
KLEYNYNSHNVYIMADKQKNGIKVNFKIRHNIEDGSVQLADHYQQNTPIGDGPVLLPDNHYLSTQSALSKDPNEKR
DHMVLLEFVTAAGITLGMDELYK
SEQ ID NO: 62
MDKKYSIGLDIGINSVGWAVITDEYKVPSKKEKVLGNTDRHSIKKNLIGALLFDSGETAEATRLKRTARRRYTRRK
NRICYLQEIFSNEMAKVDDSFFHRLEESFLVEEDKKHERHPIFGNIVDEVAYHEKYPTIYHLRKKLVDSTDKADLR
LIYLALAHMIKFRGHFLIEGDLNPDNSDVDKLFIQLVQTYNQLFEENPINASGVDAKAILSARLSKSRRLENLIAQ
LPGEKKNGLEGNLIALSLGLIPNEKSNEDLAEDAKLQLSKDTYDDDLDNLLAQIGDQYADLFLAAKNLSDAILLSD
ILRVNTEITKAPLSASMIKRYDEHHQDLTLLKALVRQQLPEKYKEIFFDQSKNGYAGYIDGGASQEEFYKFIKPIL
EKMDGTEELLVKLNREDLLRKQRTFDNGSIPHQIHLGELHAILRRQEDFYPFLKDNREKIEKILTFRIPYYVGPLA
RGNSRFAWMTRKSEETITPWNFEEVVDKGASAQSFIERMTNEDKNLPNEKVLPKHSLLYEYFTVYNELTKVKYVTE
GMRKPAFLSGEQKKAIVDLLFKINRKVIVKQLKEDYFKKIECFDSVEISGVEDRFNASLGTYHDLLKIIKDKDFLD
NEENEDILEDIVLTLTLFEDREMIEERLKTYAHLFDDKVMKQLKRRRYTGWGRLSRKLINGIRDKQSGKTILDFLK
SDGFANRNFMQLIHDDSLTFKEDIQKAQVSGQGDSLHEHIANLAGSPAIKKGILQTVKVVDELVKVMGRHKPENIV
IEMARENQTTQKGQKNSRERMKRIEEGIKELGSQILKEHPVENTQLQNEKLYLYYLQNGRDMYVDQELDINRLSDY
DVDHIVPQSFLKDDSIDNKVLTRSDKNRGKSDNVPSEEVVKKMKNYWRQLLNAKLITQRKEDNLIKAERGGLSELD
KAGFIKRQLVETRQITKHVAQILDSRMNTKYDENDKLIREVKVITLKSKLVSDERKDFQFYKVREINNYHHAHDAY
LNAVVGTALIKKYPKLESEFVYGDYKVYDVRKMIAKSEQEIGKATAKYFFYSNIMNFFKTEITLANGEIRKRPLIE
TNGETGEIVWDKGRDFATVRKVLSMPQVNIVKKTEVQTGGESKESILPKRNSDKLIARKKDWDPKKYGGFDSPTVA
YSVLVVAKVEKGKSKKLKSVKELLGITIMERSSFEKNPIDFLEAKGYKEVKKDLIIKLPKYSLFELENGRKRMLAS
AGELQKGNELALPSKYVNFLYLASHYEKLKGSPEDNEQKQLFVEQHKHYLDEIIEQISEFSKRVILADANLDKVLS
AYNKHRDKPIREQAENIIHLFTLINLGAPAAFKYFDTTIDRKRYTSTKEVLDATLIHQSITGLYETRIDLSQLGGD
XPXPXPXPXPXP
MVSKGEELFTGVVPILVELDGDVNGHKFSVSGEGEGDATYGKLTLKFICTTGKLPVPWPTLVTT
LTYGVQCFSRYPDHMKQHDFFKSAMPEGYVQERTIFFKDDGNYKTRAEVKFEGDTLVNRIELKGIDFKEDGNILGH
KLEYNYNSHNVYIMADKQKNGIKVNFKIRHNIEDGSVQLADHYQQNTPIGDGPVLLPDNHYLSTQSALSKDPNEKR
DHMVLLEFVTAAGITLGMDELYK
SEQ ID NO: 63
MDKKYSIGLDIGINSVGWAVITDEYKVPSKKEKVLGNTDRHSIKKNLIGALLFDSGETAEATRLKRTARRRYTRRK
NRICYLQEIFSNEMAKVDDSFFHRLEESFLVEEDKKHERHPIFGNIVDEVAYHEKYPTIYHLRKKLVDSTDKADLR
LIYLALAHMIKFRGHFLIEGDLNPDNSDVDKLFIQLVQTYNQLFEENPINASGVDAKAILSARLSKSRRLENLIAQ
LPGEKKNGLEGNLIALSLGLIPNEKSNEDLAEDAKLQLSKDTYDDDLDNLLAQIGDQYADLFLAAKNLSDAILLSD
ILRVNTEITKAPLSASMIKRYDEHHQDLTLLKALVRQQLPEKYKEIFFDQSKNGYAGYIDGGASQEEFYKFIKPIL
EKMDGTEELLVKLNREDLLRKQRTFDNGSIPHQIHLGELHAILRRQEDFYPFLKDNREKIEKILTFRIPYYVGPLA
RGNSRFAWMTRKSEETITPWNFEEVVDKGASAQSFIERMTNEDKNLPNEKVLPKHSLLYEYFTVYNELTKVKYVTE
GMRKPAFLSGEQKKAIVDLLFKINRKVIVKQLKEDYFKKIECFDSVEISGVEDRFNASLGTYHDLLKIIKDKDFLD
NEENEDILEDIVLTLTLFEDREMIEERLKTYAHLFDDKVMKQLKRRRYTGWGRLSRKLINGIRDKQSGKTILDFLK
SDGFANRNFMQLIHDDSLTFKEDIQKAQVSGQGDSLHEHIANLAGSPAIKKGILQTVKVVDELVKVMGRHKPENIV
IEMARENQTTQKGQKNSRERMKRIEEGIKELGSQILKEHPVENTQLQNEKLYLYYLQNGRDMYVDQELDINRLSDY
DVDHIVPQSFLKDDSIDNKVLTRSDKNRGKSDNVPSEEVVKKMKNYWRQLLNAKLITQRKEDNLIKAERGGLSELD
KAGFIKRQLVETRQITKHVAQILDSRMNTKYDENDKLIREVKVITLKSKLVSDERKDFQFYKVREINNYHHAHDAY
LNAVVGTALIKKYPKLESEFVYGDYKVYDVRKMIAKSEQEIGKATAKYFFYSNIMNFFKTEITLANGEIRKRPLIE
TNGETGEIVWDKGRDFATVRKVLSMPQVNIVKKTEVQTGGESKESILPKRNSDKLIARKKDWDPKKYGGFDSPTVA
YSVLVVAKVEKGKSKKLKSVKELLGITIMERSSFEKNPIDFLEAKGYKEVKKDLIIKLPKYSLFELENGRKRMLAS
AGELQKGNELALPSKYVNFLYLASHYEKLKGSPEDNEQKQLFVEQHKHYLDEIIEQISEFSKRVILADANLDKVLS
AYNKHRDKPIREQAENIIHLFTLTNLGAPAAFKYFDTTIDRKRYTSTKEVLDATLIHQSITGLYETRIDLSQLGGD
XPXPXPXPXPXPXP
MVSKGEELFTGVVPILVELDGDVNGHKFSVSGEGEGDATYGKLTLKFICTTGKLPVPWPTLVTT
LTYGVQCFSRYPDHMKQHDFFKSAMPEGYVQERTIFFKDDGNYKTRAEVKFEGDTLVNRIELKGIDFKEDGNILGH
KLEYNYNSHNVYIMADKQKNGIKVNFKIRHNIEDGSVQLADHYQQNTPIGDGPVLLPDNHYLSTQSALSKDPNEKR
DHMVLLEFVTAAGITLGMDELYK
SEQ ID NO: 64
MDKKYSIGLDIGINSVGWAVITDEYKVPSKKEKVLGNTDRHSIKKNLIGALLFDSGETAEATRLKRTARRRYTRRK
NRICYLQEIFSNEMAKVDDSFFHRLEESFLVEEDKKHERHPIFGNIVDEVAYHEKYPTIYHLRKKLVDSTDKADLR
LIYLALAHMIKFRGHFLIEGDLNPDNSDVDKLFIQLVQTYNQLFEENPINASGVDAKAILSARLSKSRRLENLIAQ
LPGEKKNGLEGNLIALSLGLIPNEKSNEDLAEDAKLQLSKDTYDDDLDNLLAQIGDQYADLFLAAKNLSDAILLSD
ILRVNTEITKAPLSASMIKRYDEHHQDLTLLKALVRQQLPEKYKEIFFDQSKNGYAGYIDGGASQEEFYKFIKPIL
EKMDGTEELLVKLNREDLLRKQRTFDNGSIPHQIHLGELHAILRRQEDFYPFLKDNREKIEKILTFRIPYYVGPLA
RGNSRFAWMTRKSEETITPWNFEEVVDKGASAQSFIERMTNEDKNLPNEKVLPKHSLLYEYFTVYNELTKVKYVTE
GMRKPAFLSGEQKKAIVDLLFKINRKVIVKQLKEDYFKKIECFDSVEISGVEDRFNASLGTYHDLLKIIKDKDFLD
NEENEDILEDIVLTLTLFEDREMIEERLKTYAHLFDDKVMKQLKRRRYTGWGRLSRKLINGIRDKQSGKTILDFLK
SDGFANRNFMQLIHDDSLTFKEDIQKAQVSGQGDSLHEHIANLAGSPAIKKGILQTVKVVDELVKVMGRHKPENIV
IEMARENQTTQKGQKNSRERMKRIEEGIKELGSQILKEHPVENTQLQNEKLYLYYLQNGRDMYVDQELDINRLSDY
DVDHIVPQSFLKDDSIDNKVLTRSDKNRGKSDNVPSEEVVKKMKNYWRQLLNAKLITQRKEDNLIKAERGGLSELD
KAGFIKRQLVETRQITKHVAQILDSRMNTKYDENDKLIREVKVITLKSKLVSDERKDFQFYKVREINNYHHAHDAY
LNAVVGTALIKKYPKLESEFVYGDYKVYDVRKMIAKSEQEIGKATAKYFFYSNIMNFFKTEITLANGEIRKRPLIE
TNGETGEIVWDKGRDFATVRKVLSMPQVNIVKKTEVQTGGESKESILPKRNSDKLIARKKDWDPKKYGGFDSPTVA
YSVLVVAKVEKGKSKKLKSVKELLGITIMERSSFEKNPIDFLEAKGYKEVKKDLIIKLPKYSLFELENGRKRMLAS
AGELQKGNELALPSKYVNFLYLASHYEKLKGSPEDNEQKQLFVEQHKHYLDEIIEQISEFSKRVILADANLDKVLS
AYNKHRDKPIREQAENIIHLFTLTNLGAPAAFKYFDTTIDRKRYTSTKEVLDATLIHQSITGLYETRIDLSQLGGD
XPXPXPXPXPXPXPXP
MVSKGEELFTGVVPILVELDGDVNGHKFSVSGEGEGDATYGKLTLKFICTTGKLPVPWPTLVTT
LTYGVQCFSRYPDHMKQHDFFKSAMPEGYVQERTIFFKDDGNYKTRAEVKFEGDTLVNRIELKGIDFKEDGNILGH
KLEYNYNSHNVYIMADKQKNGIKVNFKIRHNIEDGSVQLADHYQQNTPIGDGPVLLPDNHYLSTQSALSKDPNEKR
DHMVLLEFVTAAGITLGMDELYK
SEQ ID NO: 65
MDKKYSIGLDIGINSVGWAVITDEYKVPSKKEKVLGNTDRHSIKKNLIGALLFDSGETAEATRLKRTARRRYTRRK
NRICYLQEIFSNEMAKVDDSFFHRLEESFLVEEDKKHERHPIFGNIVDEVAYHEKYPTIYHLRKKLVDSTDKADLR
LIYLALAHMIKFRGHFLIEGDLNPDNSDVDKLFIQLVQTYNQLFEENPINASGVDAKAILSARLSKSRRLENLIAQ
LPGEKKNGLEGNLIALSLGLIPNEKSNEDLAEDAKLQLSKDTYDDDLDNLLAQIGDQYADLFLAAKNLSDAILLSD
ILRVNTEITKAPLSASMIKRYDEHHQDLTLLKALVRQQLPEKYKEIFFDQSKNGYAGYIDGGASQEEFYKFIKPIL
EKMDGTEELLVKLNREDLLRKQRTFDNGSIPHQIHLGELHAILRRQEDFYPFLKDNREKIEKILTFRIPYYVGPLA
RGNSRFAWMTRKSEETITPWNFEEVVDKGASAQSFIERMTNEDKNLPNEKVLPKHSLLYEYFTVYNELTKVKYVTE
GMRKPAFLSGEQKKAIVDLLFKINRKVIVKQLKEDYFKKIECFDSVEISGVEDRFNASLGTYHDLLKIIKDKDFLD
NEENEDILEDIVLTLTLFEDREMIEERLKTYAHLFDDKVMKQLKRRRYTGWGRLSRKLINGIRDKQSGKTILDFLK
SDGFANRNFMQLIHDDSLTFKEDIQKAQVSGQGDSLHEHIANLAGSPAIKKGILQTVKVVDELVKVMGRHKPENIV
IEMARENQTTQKGQKNSRERMKRIEEGIKELGSQILKEHPVENTQLQNEKLYLYYLQNGRDMYVDQELDINRLSDY
DVDHIVPQSFLKDDSIDNKVLTRSDKNRGKSDNVPSEEVVKKMKNYWRQLLNAKLITQRKEDNLIKAERGGLSELD
KAGFIKRQLVETRQITKHVAQILDSRMNTKYDENDKLIREVKVITLKSKLVSDERKDFQFYKVREINNYHHAHDAY
LNAVVGTALIKKYPKLESEFVYGDYKVYDVRKMIAKSEQEIGKATAKYFFYSNIMNFFKTEITLANGEIRKRPLIE
TNGETGEIVWDKGRDFATVRKVLSMPQVNIVKKTEVQTGGESKESILPKRNSDKLIARKKDWDPKKYGGFDSPTVA
YSVLVVAKVEKGKSKKLKSVKELLGITIMERSSFEKNPIDFLEAKGYKEVKKDLIIKLPKYSLFELENGRKRMLAS
AGELQKGNELALPSKYVNFLYLASHYEKLKGSPEDNEQKQLFVEQHKHYLDEIIEQISEFSKRVILADANLDKVLS
AYNKHRDKPIREQAENIIHLFTLINLGAPAAFKYFDTTIDRKRYTSTKEVLDATLIHQSITGLYETRIDLSQLGGD
XPXPXPXPXPXPXPXPXP
MVSKGEELFTGVVPILVELDGDVNGHKFSVSGEGEGDATYGKLTLKFICTTGKLPVPWPTLVTT
LTYGVQCFSRYPDHMKQHDFFKSAMPEGYVQERTIFFKDDGNYKTRAEVKFEGDTLVNRIELKGIDFKEDGNILGH
KLEYNYNSHNVYIMADKQKNGIKVNFKIRHNIEDGSVQLADHYQQNTPIGDGPVLLPDNHYLSTQSALSKDPNEKR
DHMVLLEFVTAAGITLGMDELYK
SEQ ID NO: 66
MDKKYSIGLDIGINSVGWAVITDEYKVPSKKEKVLGNTDRHSIKKNLIGALLFDSGETAEATRLKRTARRRYTRRK
NRICYLQEIFSNEMAKVDDSFFHRLEESFLVEEDKKHERHPIFGNIVDEVAYHEKYPTIYHLRKKLVDSTDKADLR
LIYLALAHMIKFRGHFLIEGDLNPDNSDVDKLFIQLVQTYNQLFEENPINASGVDAKAILSARLSKSRRLENLIAQ
LPGEKKNGLEGNLIALSLGLIPNEKSNEDLAEDAKLQLSKDTYDDDLDNLLAQIGDQYADLFLAAKNLSDAILLSD
ILRVNTEITKAPLSASMIKRYDEHHQDLTLLKALVRQQLPEKYKEIFFDQSKNGYAGYIDGGASQEEFYKFIKPIL
EKMDGTEELLVKLNREDLLRKQRTFDNGSIPHQIHLGELHAILRRQEDFYPFLKDNREKIEKILTFRIPYYVGPLA
RGNSRFAWMTRKSEETITPWNFEEVVDKGASAQSFIERMTNEDKNLPNEKVLPKHSLLYEYFTVYNELTKVKYVTE
GMRKPAFLSGEQKKAIVDLLFKINRKVIVKQLKEDYFKKIECFDSVEISGVEDRFNASLGTYHDLLKIIKDKDFLD
NEENEDILEDIVLTLTLFEDREMIEERLKTYAHLFDDKVMKQLKRRRYTGWGRLSRKLINGIRDKQSGKTILDFLK
SDGFANRNFMQLIHDDSLTFKEDIQKAQVSGQGDSLHEHIANLAGSPAIKKGILQTVKVVDELVKVMGRHKPENIV
IEMARENQTTQKGQKNSRERMKRIEEGIKELGSQILKEHPVENTQLQNEKLYLYYLQNGRDMYVDQELDINRLSDY
DVDHIVPQSFLKDDSIDNKVLTRSDKNRGKSDNVPSEEVVKKMKNYWRQLLNAKLITQRKEDNLIKAERGGLSELD
KAGFIKRQLVETRQITKHVAQILDSRMNTKYDENDKLIREVKVITLKSKLVSDERKDFQFYKVREINNYHHAHDAY
LNAVVGTALIKKYPKLESEFVYGDYKVYDVRKMIAKSEQEIGKATAKYFFYSNIMNFFKTEITLANGEIRKRPLIE
TNGETGEIVWDKGRDFATVRKVLSMPQVNIVKKTEVQTGGESKESILPKRNSDKLIARKKDWDPKKYGGFDSPTVA
YSVLVVAKVEKGKSKKLKSVKELLGITIMERSSFEKNPIDFLEAKGYKEVKKDLIIKLPKYSLFELENGRKRMLAS
AGELQKGNELALPSKYVNFLYLASHYEKLKGSPEDNEQKQLFVEQHKHYLDEIIEQISEFSKRVILADANLDKVLS
AYNKHRDKPIREQAENIIHLFTLINLGAPAAFKYFDTTIDRKRYTSTKEVLDATLIHQSITGLYETRIDLSQLGGD
XPXPXPXPXPXPXPXPXPXP
MVSKGEELFTGVVPILVELDGDVNGHKFSVSGEGEGDATYGKLTLKFICTTGKLPVPWPTLVTT
LTYGVQCFSRYPDHMKQHDFFKSAMPEGYVQERTIFFKDDGNYKTRAEVKFEGDTLVNRIELKGIDFKEDGNILGH
KLEYNYNSHNVYIMADKQKNGIKVNFKIRHNIEDGSVQLADHYQQNTPIGDGPVLLPDNHYLSTQSALSKDPNEKR
DHMVLLEFVTAAGITLGMDELYK
SEQ ID NO: 67
MDKKYSIGLDIGINSVGWAVITDEYKVPSKKEKVLGNTDRHSIKKNLIGALLFDSGETAEATRLKRTARRRYTRRK
NRICYLQEIFSNEMAKVDDSFFHRLEESFLVEEDKKHERHPIFGNIVDEVAYHEKYPTIYHLRKKLVDSTDKADLR
LIYLALAHMIKFRGHFLIEGDLNPDNSDVDKLFIQLVQTYNQLFEENPINASGVDAKAILSARLSKSRRLENLIAQ
LPGEKKNGLEGNLIALSLGLIPNEKSNEDLAEDAKLQLSKDTYDDDLDNLLAQIGDQYADLFLAAKNLSDAILLSD
ILRVNTEITKAPLSASMIKRYDEHHQDLTLLKALVRQQLPEKYKEIFFDQSKNGYAGYIDGGASQEEFYKFIKPIL
EKMDGTEELLVKLNREDLLRKQRTFDNGSIPHQIHLGELHAILRRQEDFYPFLKDNREKIEKILTFRIPYYVGPLA
RGNSRFAWMTRKSEETITPWNFEEVVDKGASAQSFIERMTNEDKNLPNEKVLPKHSLLYEYFTVYNELTKVKYVTE
GMRKPAFLSGEQKKAIVDLLFKINRKVIVKQLKEDYFKKIECFDSVEISGVEDRFNASLGTYHDLLKIIKDKDFLD
NEENEDILEDIVLTLTLFEDREMIEERLKTYAHLFDDKVMKQLKRRRYTGWGRLSRKLINGIRDKQSGKTILDFLK
SDGFANRNFMQLIHDDSLTFKEDIQKAQVSGQGDSLHEHIANLAGSPAIKKGILQTVKVVDELVKVMGRHKPENIV
IEMARENQTTQKGQKNSRERMKRIEEGIKELGSQILKEHPVENTQLQNEKLYLYYLQNGRDMYVDQELDINRLSDY
DVDHIVPQSFLKDDSIDNKVLTRSDKNRGKSDNVPSEEVVKKMKNYWRQLLNAKLITQRKEDNLIKAERGGLSELD
KAGFIKRQLVETRQITKHVAQILDSRMNTKYDENDKLIREVKVITLKSKLVSDERKDFQFYKVREINNYHHAHDAY
LNAVVGTALIKKYPKLESEFVYGDYKVYDVRKMIAKSEQEIGKATAKYFFYSNIMNFFKTEITLANGEIRKRPLIE
TNGETGEIVWDKGRDFATVRKVLSMPQVNIVKKTEVQTGGESKESILPKRNSDKLIARKKDWDPKKYGGFDSPTVA
YSVLVVAKVEKGKSKKLKSVKELLGITIMERSSFEKNPIDFLEAKGYKEVKKDLIIKLPKYSLFELENGRKRMLAS
AGELQKGNELALPSKYVNFLYLASHYEKLKGSPEDNEQKQLFVEQHKHYLDEIIEQISEFSKRVILADANLDKVLS
AYNKHRDKPIREQAENIIHLFTLINLGAPAAFKYFDTTIDRKRYTSTKEVLDATLIHQSITGLYETRIDLSQLGGD
XPXPXPXPXPXPXPXPXPXPXP
MVSKGEELFTGVVPILVELDGDVNGHKFSVSGEGEGDATYGKLTLKFICTTGKLPVPWPTLVTT
LTYGVQCFSRYPDHMKQHDFFKSAMPEGYVQERTIFFKDDGNYKTRAEVKFEGDTLVNRIELKGIDFKEDGNILGH
KLEYNYNSHNVYIMADKQKNGIKVNFKIRHNIEDGSVQLADHYQQNTPIGDGPVLLPDNHYLSTQSALSKDPNEKR
DHMVLLEFVTAAGITLGMDELYK
SEQ ID NO: 68
MDKKYSIGLDIGINSVGWAVITDEYKVPSKKEKVLGNTDRHSIKKNLIGALLFDSGETAEATRLKRTARRRYTRRK
NRICYLQEIFSNEMAKVDDSFFHRLEESFLVEEDKKHERHPIFGNIVDEVAYHEKYPTIYHLRKKLVDSTDKADLR
LIYLALAHMIKFRGHFLIEGDLNPDNSDVDKLFIQLVQTYNQLFEENPINASGVDAKAILSARLSKSRRLENLIAQ
LPGEKKNGLEGNLIALSLGLIPNEKSNEDLAEDAKLQLSKDTYDDDLDNLLAQIGDQYADLFLAAKNLSDAILLSD
ILRVNTEITKAPLSASMIKRYDEHHQDLTLLKALVRQQLPEKYKEIFFDQSKNGYAGYIDGGASQEEFYKFIKPIL
EKMDGTEELLVKLNREDLLRKQRTFDNGSIPHQIHLGELHAILRRQEDFYPFLKDNREKIEKILTFRIPYYVGPLA
RGNSRFAWMTRKSEETITPWNFEEVVDKGASAQSFIERMTNEDKNLPNEKVLPKHSLLYEYFTVYNELTKVKYVTE
GMRKPAFLSGEQKKAIVDLLFKINRKVIVKQLKEDYFKKIECFDSVEISGVEDRFNASLGTYHDLLKIIKDKDFLD
NEENEDILEDIVLTLTLFEDREMIEERLKTYAHLFDDKVMKQLKRRRYTGWGRLSRKLINGIRDKQSGKTILDFLK
SDGFANRNFMQLIHDDSLTFKEDIQKAQVSGQGDSLHEHIANLAGSPAIKKGILQTVKVVDELVKVMGRHKPENIV
IEMARENQTTQKGQKNSRERMKRIEEGIKELGSQILKEHPVENTQLQNEKLYLYYLQNGRDMYVDQELDINRLSDY
DVDHIVPQSFLKDDSIDNKVLTRSDKNRGKSDNVPSEEVVKKMKNYWRQLLNAKLITQRKEDNLIKAERGGLSELD
KAGFIKRQLVETRQITKHVAQILDSRMNTKYDENDKLIREVKVITLKSKLVSDERKDFQFYKVREINNYHHAHDAY
LNAVVGTALIKKYPKLESEFVYGDYKVYDVRKMIAKSEQEIGKATAKYFFYSNIMNFFKTEITLANGEIRKRPLIE
TNGETGEIVWDKGRDFATVRKVLSMPQVNIVKKTEVQTGGESKESILPKRNSDKLIARKKDWDPKKYGGFDSPTVA
YSVLVVAKVEKGKSKKLKSVKELLGITIMERSSFEKNPIDFLEAKGYKEVKKDLIIKLPKYSLFELENGRKRMLAS
AGELQKGNELALPSKYVNFLYLASHYEKLKGSPEDNEQKQLFVEQHKHYLDEIIEQISEFSKRVILADANLDKVLS
AYNKHRDKPIREQAENIIHLFTLTNLGAPAAFKYFDTTIDRKRYTSTKEVLDATLIHQSITGLYETRIDLSQLGGD
XPXPXPXPXPXPXPXPXPXPXPXP
MVSKGEELFTGVVPILVELDGDVNGHKFSVSGEGEGDATYGKLTLKFICTTGKLPVPWPTLVTT
LTYGVQCFSRYPDHMKQHDFFKSAMPEGYVQERTIFFKDDGNYKTRAEVKFEGDTLVNRIELKGIDFKEDGNILGH
KLEYNYNSHNVYIMADKQKNGIKVNFKIRHNIEDGSVQLADHYQQNTPIGDGPVLLPDNHYLSTQSALSKDPNEKR
DHMVLLEFVTAAGITLGMDELYK
SEQ ID NO: 69
MDKKYSIGLDIGINSVGWAVITDEYKVPSKKEKVLGNTDRHSIKKNLIGALLFDSGETAEATRLKRTARRRYTRRK
NRICYLQEIFSNEMAKVDDSFFHRLEESFLVEEDKKHERHPIFGNIVDEVAYHEKYPTIYHLRKKLVDSTDKADLR
LIYLALAHMIKFRGHFLIEGDLNPDNSDVDKLFIQLVQTYNQLFEENPINASGVDAKAILSARLSKSRRLENLIAQ
LPGEKKNGLEGNLIALSLGLIPNEKSNEDLAEDAKLQLSKDTYDDDLDNLLAQIGDQYADLFLAAKNLSDAILLSD
ILRVNTEITKAPLSASMIKRYDEHHQDLTLLKALVRQQLPEKYKEIFFDQSKNGYAGYIDGGASQEEFYKFIKPIL
EKMDGTEELLVKLNREDLLRKQRTFDNGSIPHQIHLGELHAILRRQEDFYPFLKDNREKIEKILTFRIPYYVGPLA
RGNSRFAWMTRKSEETITPWNFEEVVDKGASAQSFIERMTNEDKNLPNEKVLPKHSLLYEYFTVYNELTKVKYVTE
GMRKPAFLSGEQKKAIVDLLFKINRKVIVKQLKEDYFKKIECFDSVEISGVEDRFNASLGTYHDLLKIIKDKDFLD
NEENEDILEDIVLTLTLFEDREMIEERLKTYAHLFDDKVMKQLKRRRYTGWGRLSRKLINGIRDKQSGKTILDFLK
SDGFANRNFMQLIHDDSLTFKEDIQKAQVSGQGDSLHEHIANLAGSPAIKKGILQTVKVVDELVKVMGRHKPENIV
IEMARENQTTQKGQKNSRERMKRIEEGIKELGSQILKEHPVENTQLQNEKLYLYYLQNGRDMYVDQELDINRLSDY
DVDHIVPQSFLKDDSIDNKVLTRSDKNRGKSDNVPSEEVVKKMKNYWRQLLNAKLITQRKEDNLIKAERGGLSELD
KAGFIKRQLVETRQITKHVAQILDSRMNTKYDENDKLIREVKVITLKSKLVSDERKDFQFYKVREINNYHHAHDAY
LNAVVGTALIKKYPKLESEFVYGDYKVYDVRKMIAKSEQEIGKATAKYFFYSNIMNFFKTEITLANGEIRKRPLIE
TNGETGEIVWDKGRDFATVRKVLSMPQVNIVKKTEVQTGGESKESILPKRNSDKLIARKKDWDPKKYGGFDSPTVA
YSVLVVAKVEKGKSKKLKSVKELLGITIMERSSFEKNPIDFLEAKGYKEVKKDLIIKLPKYSLFELENGRKRMLAS
AGELQKGNELALPSKYVNFLYLASHYEKLKGSPEDNEQKQLFVEQHKHYLDEIIEQISEFSKRVILADANLDKVLS
AYNKHRDKPIREQAENIIHLFTLTNLGAPAAFKYFDTTIDRKRYTSTKEVLDATLIHQSITGLYETRIDLSQLGGD
XPXPXPXPXPXPXPXPXPXPXPXPXP
MVSKGEELFTGVVPILVELDGDVNGHKFSVSGEGEGDATYGKLTLKFICTTGKLPVPWPTLVTT
LTYGVQCFSRYPDHMKQHDFFKSAMPEGYVQERTIFFKDDGNYKTRAEVKFEGDTLVNRIELKGIDFKEDGNILGH
KLEYNYNSHNVYIMADKQKNGIKVNFKIRHNIEDGSVQLADHYQQNTPIGDGPVLLPDNHYLSTQSALSKDPNEKR
DHMVLLEFVTAAGITLGMDELYK
SEQ ID NO: 70
MDKKYSIGLDIGINSVGWAVITDEYKVPSKKEKVLGNTDRHSIKKNLIGALLFDSGETAEATRLKRTARRRYTRRK
NRICYLQEIFSNEMAKVDDSFFHRLEESFLVEEDKKHERHPIFGNIVDEVAYHEKYPTIYHLRKKLVDSTDKADLR
LIYLALAHMIKFRGHFLIEGDLNPDNSDVDKLFIQLVQTYNQLFEENPINASGVDAKAILSARLSKSRRLENLIAQ
LPGEKKNGLEGNLIALSLGLIPNEKSNEDLAEDAKLQLSKDTYDDDLDNLLAQIGDQYADLFLAAKNLSDAILLSD
ILRVNTEITKAPLSASMIKRYDEHHQDLTLLKALVRQQLPEKYKEIFFDQSKNGYAGYIDGGASQEEFYKFIKPIL
EKMDGTEELLVKLNREDLLRKQRTFDNGSIPHQIHLGELHAILRRQEDFYPFLKDNREKIEKILTFRIPYYVGPLA
RGNSRFAWMTRKSEETITPWNFEEVVDKGASAQSFIERMTNEDKNLPNEKVLPKHSLLYEYFTVYNELTKVKYVTE
GMRKPAFLSGEQKKAIVDLLFKINRKVIVKQLKEDYFKKIECFDSVEISGVEDRFNASLGTYHDLLKIIKDKDFLD
NEENEDILEDIVLTLTLFEDREMIEERLKTYAHLFDDKVMKQLKRRRYTGWGRLSRKLINGIRDKQSGKTILDFLK
SDGFANRNFMQLIHDDSLTFKEDIQKAQVSGQGDSLHEHIANLAGSPAIKKGILQTVKVVDELVKVMGRHKPENIV
IEMARENQTTQKGQKNSRERMKRIEEGIKELGSQILKEHPVENTQLQNEKLYLYYLQNGRDMYVDQELDINRLSDY
DVDHIVPQSFLKDDSIDNKVLTRSDKNRGKSDNVPSEEVVKKMKNYWRQLLNAKLITQRKEDNLIKAERGGLSELD
KAGFIKRQLVETRQITKHVAQILDSRMNTKYDENDKLIREVKVITLKSKLVSDERKDFQFYKVREINNYHHAHDAY
LNAVVGTALIKKYPKLESEFVYGDYKVYDVRKMIAKSEQEIGKATAKYFFYSNIMNFFKTEITLANGEIRKRPLIE
TNGETGEIVWDKGRDFATVRKVLSMPQVNIVKKTEVQTGGESKESILPKRNSDKLIARKKDWDPKKYGGFDSPTVA
YSVLVVAKVEKGKSKKLKSVKELLGITIMERSSFEKNPIDFLEAKGYKEVKKDLIIKLPKYSLFELENGRKRMLAS
AGELQKGNELALPSKYVNFLYLASHYEKLKGSPEDNEQKQLFVEQHKHYLDEIIEQISEFSKRVILADANLDKVLS
AYNKHRDKPIREQAENIIHLFTLINLGAPAAFKYFDTTIDRKRYTSTKEVLDATLIHQSITGLYETRIDLSQLGGD
XPXPXPXPXPXPXPXPXPXPXPXPXPXP
MVSKGEELFTGVVPILVELDGDVNGHKFSVSGEGEGDATYGKLTLKFICTTGKLPVPWPTLVTT
LTYGVQCFSRYPDHMKQHDFFKSAMPEGYVQERTIFFKDDGNYKTRAEVKFEGDTLVNRIELKGIDFKEDGNILGH
KLEYNYNSHNVYIMADKQKNGIKVNFKIRHNIEDGSVQLADHYQQNTPIGDGPVLLPDNHYLSTQSALSKDPNEKR
DHMVLLEFVTAAGITLGMDELYK
SEQ ID NO: 71
MDKKYSIGLDIGINSVGWAVITDEYKVPSKKEKVLGNTDRHSIKKNLIGALLFDSGETAEATRLKRTARRRYTRRK
NRICYLQEIFSNEMAKVDDSFFHRLEESFLVEEDKKHERHPIFGNIVDEVAYHEKYPTIYHLRKKLVDSTDKADLR
LIYLALAHMIKFRGHFLIEGDLNPDNSDVDKLFIQLVQTYNQLFEENPINASGVDAKAILSARLSKSRRLENLIAQ
LPGEKKNGLEGNLIALSLGLIPNEKSNEDLAEDAKLQLSKDTYDDDLDNLLAQIGDQYADLFLAAKNLSDAILLSD
ILRVNTEITKAPLSASMIKRYDEHHQDLTLLKALVRQQLPEKYKEIFFDQSKNGYAGYIDGGASQEEFYKFIKPIL
EKMDGTEELLVKLNREDLLRKQRTFDNGSIPHQIHLGELHAILRRQEDFYPFLKDNREKIEKILTFRIPYYVGPLA
RGNSRFAWMTRKSEETITPWNFEEVVDKGASAQSFIERMTNEDKNLPNEKVLPKHSLLYEYFTVYNELTKVKYVTE
GMRKPAFLSGEQKKAIVDLLFKINRKVIVKQLKEDYFKKIECFDSVEISGVEDRFNASLGTYHDLLKIIKDKDFLD
NEENEDILEDIVLTLTLFEDREMIEERLKTYAHLFDDKVMKQLKRRRYTGWGRLSRKLINGIRDKQSGKTILDFLK
SDGFANRNFMQLIHDDSLTFKEDIQKAQVSGQGDSLHEHIANLAGSPAIKKGILQTVKVVDELVKVMGRHKPENIV
IEMARENQTTQKGQKNSRERMKRIEEGIKELGSQILKEHPVENTQLQNEKLYLYYLQNGRDMYVDQELDINRLSDY
DVDHIVPQSFLKDDSIDNKVLTRSDKNRGKSDNVPSEEVVKKMKNYWRQLLNAKLITQRKEDNLIKAERGGLSELD
KAGFIKRQLVETRQITKHVAQILDSRMNTKYDENDKLIREVKVITLKSKLVSDERKDFQFYKVREINNYHHAHDAY
LNAVVGTALIKKYPKLESEFVYGDYKVYDVRKMIAKSEQEIGKATAKYFFYSNIMNFFKTEITLANGEIRKRPLIE
TNGETGEIVWDKGRDFATVRKVLSMPQVNIVKKTEVQTGGESKESILPKRNSDKLIARKKDWDPKKYGGFDSPTVA
YSVLVVAKVEKGKSKKLKSVKELLGITIMERSSFEKNPIDFLEAKGYKEVKKDLIIKLPKYSLFELENGRKRMLAS
AGELQKGNELALPSKYVNFLYLASHYEKLKGSPEDNEQKQLFVEQHKHYLDEIIEQISEFSKRVILADANLDKVLS
AYNKHRDKPIREQAENIIHLFTLINLGAPAAFKYFDTTIDRKRYTSTKEVLDATLIHQSITGLYETRIDLSQLGGD
GGGGSEAAAKGGGGS
MVSKGEELFTGVVPILVELDGDVNGHKFSVSGEGEGDATYGKLTLKFICTTGKLPVPWPTLVTT
LTYGVQCFSRYPDHMKQHDFFKSAMPEGYVQERTIFFKDDGNYKTRAEVKFEGDTLVNRIELKGIDFKEDGNILGH
KLEYNYNSHNVYIMADKQKNGIKVNFKIRHNIEDGSVQLADHYQQNTPIGDGPVLLPDNHYLSTQSALSKDPNEKR
DHMVLLEFVTAAGITLGMDELYK

[0096] Table V.2 provides chimera fusion proteins between Cas9 amino acid sequences, linker amino acid sequences (underlined), and mCherry amino acid sequences (bolded, italicized).

TABLE V.2
Cas9-Linker-mCherryChimeras

SEQ ID NO: 72
MDKKYSIGLDIGTNSVGWAVITDEYKVPSKKFKVLGNTDRHSIKKNLIGALLFDSGETAEATRLKRTARRRYTRRK
NRICYLQEIFSNEMAKVDDSFFHRLEESFLVEEDKKHERHPIFGNIVDEVAYHEKYPTIYHLRKKLVDSTDKADLR
LIYLALAHMIKFRGHFLIEGDLNPDNSDVDKLFIQLVQTYNQLFEENPINASGVDAKAILSARLSKSRRLENLIAQ
LPGEKKNGLFGNLIALSLGLTPNFKSNFDLAEDAKLQLSKDTYDDDLDNLLAQIGDQYADLFLAAKNLSDAILLSD
ILRVNTEITKAPLSASMIKRYDEHHQDLTLLKALVRQQLPEKYKEIFFDQSKNGYAGYIDGGASQEEFYKFIKPIL
EKMDGTEELLVKLNREDLLRKQRTFDNGSIPHQIHLGELHAILRRQEDFYPFLKDNREKIEKILTFRIPYYVGPLA
RGNSRFAWMTRKSEETITPWNFEEVVDKGASAQSFIERMTNFDKNLPNEKVLPKHSLLYEYFTVYNELTKVKYVTE
GMRKPAFLSGEQKKAIVDLLFKTNRKVTVKQLKEDYFKKIECFDSVEISGVEDRFNASLGTYHDLLKIIKDKDFLD
NEENEDILEDIVLTLTLFEDREMIEERLKTYAHLFDDKVMKQLKRRRYTGWGRLSRKLINGIRDKQSGKTILDFLK
SDGFANRNFMQLIHDDSLTFKEDIQKAQVSGQGDSLHEHIANLAGSPAIKKGILQTVKVVDELVKVMGRHKPENIV
IEMARENQTTQKGQKNSRERMKRIEEGIKELGSQILKEHPVENTQLQNEKLYLYYLQNGRDMYVDQELDINRLSDY
DVDHIVPQSFLKDDSIDNKVLTRSDKNRGKSDNVPSEEVVKKMKNYWRQLLNAKLITQRKFDNLTKAERGGLSELD
KAGFIKRQLVETRQITKHVAQILDSRMNTKYDENDKLIREVKVITLKSKLVSDFRKDFQFYKVREINNYHHAHDAY
LNAVVGTALIKKYPKLESEFVYGDYKVYDVRKMIAKSEQEIGKATAKYFFYSNIMNFFKTEITLANGEIRKRPLIE
TNGETGEIVWDKGRDFATVRKVLSMPQVNIVKKTEVQTGGFSKESILPKRNSDKLIARKKDWDPKKYGGFDSPTVA
YSVLVVAKVEKGKSKKLKSVKELLGITIMERSSFEKNPIDFLEAKGYKEVKKDLIIKLPKYSLFELENGRKRMLAS
AGELQKGNELALPSKYVNFLYLASHYEKLKGSPEDNEQKQLFVEQHKHYLDEIIEQISEFSKRVILADANLDKVLS
AYNKHRDKPIREQAENIIHLFTLTNLGAPAAFKYFDTTIDRKRYTSTKEVLDATLIHQSITGLYETRIDLSQLGGD
GSAGSAAGSGEF
MVSKGEEDNMAIIKEFMRFKVHMEGSVNGHEFEIEGEGEGRPYEGTQTAKLKVTKGGPLPFAWD
ILSPQFMYGSKAYVKHPADIPDYLKLSFPEGFKWERVMNFEDGGVVTVTQDSSLQDGEFIYKVKLRGTNFPSDGPV
MQKKTMGWEASSERMYPEDGALKGEIKQRLKLKDGGHYDAEVKTTYKAKKPVQLPGAYNVNIKLDITSHNEDYTIV
EQYERAEGRHSTGGMDELYK
SEQ ID NO: 73
MDKKYSIGLDIGTNSVGWAVITDEYKVPSKKFKVLGNTDRHSIKKNLIGALLFDSGETAEATRLKRTARRRYTRRK
NRICYLQEIFSNEMAKVDDSFFHRLEESFLVEEDKKHERHPIFGNIVDEVAYHEKYPTIYHLRKKLVDSTDKADLR
LIYLALAHMIKFRGHFLIEGDLNPDNSDVDKLFIQLVQTYNQLFEENPINASGVDAKAILSARLSKSRRLENLIAQ
LPGEKKNGLFGNLIALSLGLTPNFKSNFDLAEDAKLQLSKDTYDDDLDNLLAQIGDQYADLFLAAKNLSDAILLSD
ILRVNTEITKAPLSASMIKRYDEHHQDLTLLKALVRQQLPEKYKEIFFDQSKNGYAGYIDGGASQEEFYKFIKPIL
EKMDGTEELLVKLNREDLLRKQRTFDNGSIPHQIHLGELHAILRRQEDFYPFLKDNREKIEKILTFRIPYYVGPLA
RGNSRFAWMTRKSEETITPWNFEEVVDKGASAQSFIERMTNFDKNLPNEKVLPKHSLLYEYFTVYNELTKVKYVTE
GMRKPAFLSGEQKKAIVDLLFKTNRKVTVKQLKEDYFKKIECFDSVEISGVEDRFNASLGTYHDLLKIIKDKDFLD
NEENEDILEDIVLTLTLFEDREMIEERLKTYAHLFDDKVMKQLKRRRYTGWGRLSRKLINGIRDKQSGKTILDFLK
SDGFANRNFMQLIHDDSLTFKEDIQKAQVSGQGDSLHEHIANLAGSPAIKKGILQTVKVVDELVKVMGRHKPENIV
IEMARENQTTQKGQKNSRERMKRIEEGIKELGSQILKEHPVENTQLQNEKLYLYYLQNGRDMYVDQELDINRLSDY
DVDHIVPQSFLKDDSIDNKVLTRSDKNRGKSDNVPSEEVVKKMKNYWRQLLNAKLITQRKFDNLTKAERGGLSELD
KAGFIKRQLVETRQITKHVAQILDSRMNTKYDENDKLIREVKVITLKSKLVSDFRKDFQFYKVREINNYHHAHDAY
LNAVVGTALIKKYPKLESEFVYGDYKVYDVRKMIAKSEQEIGKATAKYFFYSNIMNFFKTEITLANGEIRKRPLIE
TNGETGEIVWDKGRDFATVRKVLSMPQVNIVKKTEVQTGGFSKESILPKRNSDKLIARKKDWDPKKYGGFDSPTVA
YSVLVVAKVEKGKSKKLKSVKELLGITIMERSSFEKNPIDFLEAKGYKEVKKDLIIKLPKYSLFELENGRKRMLAS
AGELQKGNELALPSKYVNFLYLASHYEKLKGSPEDNEQKQLFVEQHKHYLDEIIEQISEFSKRVILADANLDKVLS
AYNKHRDKPIREQAENIIHLFTLTNLGAPAAFKYFDTTIDRKRYTSTKEVLDATLIHQSITGLYETRIDLSQLGGD
GGGGSGGGGSGGGGSGGGGS
MVSKGEEDNMAIIKEFMRFKVHMEGSVNGHEFEIEGEGEGRPYEGTQTAKLKVTKGGPLPFAWD
ILSPQFMYGSKAYVKHPADIPDYLKLSFPEGFKWERVMNFEDGGVVTVTQDSSLQDGEFIYKVKLRGTNFPSDGPV
MQKKTMGWEASSERMYPEDGALKGEIKQRLKLKDGGHYDAEVKTTYKAKKPVQLPGAYNVNIKLDITSHNEDYTIV
EQYERAEGRHSTGGMDELYK
SEQ ID NO: 74
MDKKYSIGLDIGTNSVGWAVITDEYKVPSKKFKVLGNTDRHSIKKNLIGALLFDSGETAEATRLKRTARRRYTRRK
NRICYLQEIFSNEMAKVDDSFFHRLEESFLVEEDKKHERHPIFGNIVDEVAYHEKYPTIYHLRKKLVDSTDKADLR
LIYLALAHMIKFRGHFLIEGDLNPDNSDVDKLFIQLVQTYNQLFEENPINASGVDAKAILSARLSKSRRLENLIAQ
LPGEKKNGLFGNLIALSLGLTPNFKSNFDLAEDAKLQLSKDTYDDDLDNLLAQIGDQYADLFLAAKNLSDAILLSD
ILRVNTEITKAPLSASMIKRYDEHHQDLTLLKALVRQQLPEKYKEIFFDQSKNGYAGYIDGGASQEEFYKFIKPIL
EKMDGTEELLVKLNREDLLRKQRTFDNGSIPHQIHLGELHAILRRQEDFYPFLKDNREKIEKILTFRIPYYVGPLA
RGNSRFAWMTRKSEETITPWNFEEVVDKGASAQSFIERMTNFDKNLPNEKVLPKHSLLYEYFTVYNELTKVKYVTE
GMRKPAFLSGEQKKAIVDLLFKTNRKVTVKQLKEDYFKKIECFDSVEISGVEDRFNASLGTYHDLLKIIKDKDFLD
NEENEDILEDIVLTLTLFEDREMIEERLKTYAHLFDDKVMKQLKRRRYTGWGRLSRKLINGIRDKQSGKTILDFLK
SDGFANRNFMQLIHDDSLTFKEDIQKAQVSGQGDSLHEHIANLAGSPAIKKGILQTVKVVDELVKVMGRHKPENIV
IEMARENQTTQKGQKNSRERMKRIEEGIKELGSQILKEHPVENTQLQNEKLYLYYLQNGRDMYVDQELDINRLSDY
DVDHIVPQSFLKDDSIDNKVLTRSDKNRGKSDNVPSEEVVKKMKNYWRQLLNAKLITQRKFDNLTKAERGGLSELD
KAGFIKRQLVETRQITKHVAQILDSRMNTKYDENDKLIREVKVITLKSKLVSDFRKDFQFYKVREINNYHHAHDAY
LNAVVGTALIKKYPKLESEFVYGDYKVYDVRKMIAKSEQEIGKATAKYFFYSNIMNFFKTEITLANGEIRKRPLIE
TNGETGEIVWDKGRDFATVRKVLSMPQVNIVKKTEVQTGGFSKESILPKRNSDKLIARKKDWDPKKYGGFDSPTVA
YSVLVVAKVEKGKSKKLKSVKELLGITIMERSSFEKNPIDFLEAKGYKEVKKDLIIKLPKYSLFELENGRKRMLAS
AGELQKGNELALPSKYVNFLYLASHYEKLKGSPEDNEQKQLFVEQHKHYLDEIIEQISEFSKRVILADANLDKVLS
AYNKHRDKPIREQAENIIHLFTLTNLGAPAAFKYFDTTIDRKRYTSTKEVLDATLIHQSITGLYETRIDLSQLGGD
AEAAAKEAAAKEAAAKEAAAKA
MVSKGEEDNMAIIKEFMRFKVHMEGSVNGHEFEIEGEGEGRPYEGTQTAKLKVTKGGPLPFAWD
ILSPQFMYGSKAYVKHPADIPDYLKLSFPEGFKWERVMNFEDGGVVTVTQDSSLQDGEFIYKVKLRGTNFPSDGPV
MQKKTMGWEASSERMYPEDGALKGEIKQRLKLKDGGHYDAEVKTTYKAKKPVQLPGAYNVNIKLDITSHNEDYTIV
EQYERAEGRHSTGGMDELYK
SEQ ID NO: 75
MDKKYSIGLDIGTNSVGWAVITDEYKVPSKKFKVLGNTDRHSIKKNLIGALLFDSGETAEATRLKRTARRRYTRRK
NRICYLQEIFSNEMAKVDDSFFHRLEESFLVEEDKKHERHPIFGNIVDEVAYHEKYPTIYHLRKKLVDSTDKADLR
LIYLALAHMIKFRGHFLIEGDLNPDNSDVDKLFIQLVQTYNQLFEENPINASGVDAKAILSARLSKSRRLENLIAQ
LPGEKKNGLFGNLIALSLGLTPNFKSNFDLAEDAKLQLSKDTYDDDLDNLLAQIGDQYADLFLAAKNLSDAILLSD
ILRVNTEITKAPLSASMIKRYDEHHQDLTLLKALVRQQLPEKYKEIFFDQSKNGYAGYIDGGASQEEFYKFIKPIL
EKMDGTEELLVKLNREDLLRKQRTFDNGSIPHQIHLGELHAILRRQEDFYPFLKDNREKIEKILTFRIPYYVGPLA
RGNSRFAWMTRKSEETITPWNFEEVVDKGASAQSFIERMTNFDKNLPNEKVLPKHSLLYEYFTVYNELTKVKYVTE
GMRKPAFLSGEQKKAIVDLLFKTNRKVTVKQLKEDYFKKIECFDSVEISGVEDRFNASLGTYHDLLKIIKDKDFLD
NEENEDILEDIVLTLTLFEDREMIEERLKTYAHLFDDKVMKQLKRRRYTGWGRLSRKLINGIRDKQSGKTILDFLK
SDGFANRNFMQLIHDDSLTFKEDIQKAQVSGQGDSLHEHIANLAGSPAIKKGILQTVKVVDELVKVMGRHKPENIV
IEMARENQTTQKGQKNSRERMKRIEEGIKELGSQILKEHPVENTQLQNEKLYLYYLQNGRDMYVDQELDINRLSDY
DVDHIVPQSFLKDDSIDNKVLTRSDKNRGKSDNVPSEEVVKKMKNYWRQLLNAKLITQRKFDNLTKAERGGLSELD
KAGFIKRQLVETRQITKHVAQILDSRMNTKYDENDKLIREVKVITLKSKLVSDFRKDFQFYKVREINNYHHAHDAY
LNAVVGTALIKKYPKLESEFVYGDYKVYDVRKMIAKSEQEIGKATAKYFFYSNIMNFFKTEITLANGEIRKRPLIE
TNGETGEIVWDKGRDFATVRKVLSMPQVNIVKKTEVQTGGFSKESILPKRNSDKLIARKKDWDPKKYGGFDSPTVA
YSVLVVAKVEKGKSKKLKSVKELLGITIMERSSFEKNPIDFLEAKGYKEVKKDLIIKLPKYSLFELENGRKRMLAS
AGELQKGNELALPSKYVNFLYLASHYEKLKGSPEDNEQKQLFVEQHKHYLDEIIEQISEFSKRVILADANLDKVLS
AYNKHRDKPIREQAENIIHLFTLTNLGAPAAFKYFDTTIDRKRYTSTKEVLDATLIHQSITGLYETRIDLSQLGGD
AEAAAKEAAAKEAAAKEAAAKALEAEAAAKEAAAKEAAAKEAAAKA
MVSKGEEDNMAIIKEFMRFKVHMEGSVNGHEFEIEGEGEGRPYEGTQTAKLKVTKGGPLPFAWD
ILSPQFMYGSKAYVKHPADIPDYLKLSFPEGFKWERVMNFEDGGVVTVTQDSSLQDGEFIYKVKLRGTNFPSDGPV
MQKKTMGWEASSERMYPEDGALKGEIKQRLKLKDGGHYDAEVKTTYKAKKPVQLPGAYNVNIKLDITSHNEDYTIV
EQYERAEGRHSTGGMDELYK
SEQ ID NO: 76
MDKKYSIGLDIGTNSVGWAVITDEYKVPSKKFKVLGNTDRHSIKKNLIGALLFDSGETAEATRLKRTARRRYTRRK
NRICYLQEIFSNEMAKVDDSFFHRLEESFLVEEDKKHERHPIFGNIVDEVAYHEKYPTIYHLRKKLVDSTDKADLR
LIYLALAHMIKFRGHFLIEGDLNPDNSDVDKLFIQLVQTYNQLFEENPINASGVDAKAILSARLSKSRRLENLIAQ
LPGEKKNGLFGNLIALSLGLTPNFKSNFDLAEDAKLQLSKDTYDDDLDNLLAQIGDQYADLFLAAKNLSDAILLSD
ILRVNTEITKAPLSASMIKRYDEHHQDLTLLKALVRQQLPEKYKEIFFDQSKNGYAGYIDGGASQEEFYKFIKPIL
EKMDGTEELLVKLNREDLLRKQRTFDNGSIPHQIHLGELHAILRRQEDFYPFLKDNREKIEKILTFRIPYYVGPLA
RGNSRFAWMTRKSEETITPWNFEEVVDKGASAQSFIERMTNFDKNLPNEKVLPKHSLLYEYFTVYNELTKVKYVTE
GMRKPAFLSGEQKKAIVDLLFKTNRKVTVKQLKEDYFKKIECFDSVEISGVEDRFNASLGTYHDLLKIIKDKDFLD
NEENEDILEDIVLTLTLFEDREMIEERLKTYAHLFDDKVMKQLKRRRYTGWGRLSRKLINGIRDKQSGKTILDFLK
SDGFANRNFMQLIHDDSLTFKEDIQKAQVSGQGDSLHEHIANLAGSPAIKKGILQTVKVVDELVKVMGRHKPENIV
IEMARENQTTQKGQKNSRERMKRIEEGIKELGSQILKEHPVENTQLQNEKLYLYYLQNGRDMYVDQELDINRLSDY
DVDHIVPQSFLKDDSIDNKVLTRSDKNRGKSDNVPSEEVVKKMKNYWRQLLNAKLITQRKFDNLTKAERGGLSELD
KAGFIKRQLVETRQITKHVAQILDSRMNTKYDENDKLIREVKVITLKSKLVSDFRKDFQFYKVREINNYHHAHDAY
LNAVVGTALIKKYPKLESEFVYGDYKVYDVRKMIAKSEQEIGKATAKYFFYSNIMNFFKTEITLANGEIRKRPLIE
TNGETGEIVWDKGRDFATVRKVLSMPQVNIVKKTEVQTGGFSKESILPKRNSDKLIARKKDWDPKKYGGFDSPTVA
YSVLVVAKVEKGKSKKLKSVKELLGITIMERSSFEKNPIDFLEAKGYKEVKKDLIIKLPKYSLFELENGRKRMLAS
AGELQKGNELALPSKYVNFLYLASHYEKLKGSPEDNEQKQLFVEQHKHYLDEIIEQISEFSKRVILADANLDKVLS
AYNKHRDKPIREQAENIIHLFTLTNLGAPAAFKYFDTTIDRKRYTSTKEVLDATLIHQSITGLYETRIDLSQLGGD
LEAEAAAKEAAAKEAAAKEAAAKALEAEAAAKEAAAKEAAAKEAAAKALE
MVSKGEEDNMAIIKEFMRFKVHMEGSVNGHEFEIEGEGEGRPYEGTQTAKLKVTKGGPLPFAWD
ILSPQFMYGSKAYVKHPADIPDYLKLSFPEGFKWERVMNFEDGGVVTVTQDSSLQDGEFIYKVKLRGTNFPSDGPV
MQKKTMGWEASSERMYPEDGALKGEIKQRLKLKDGGHYDAEVKTTYKAKKPVQLPGAYNVNIKLDITSHNEDYTIV
EQYERAEGRHSTGGMDELYK
SEQ ID NO: 77
[sequence omitted]
APA
MVSKGEEDNMAIIKEFMRFKVHMEGSVNGHEFEIEGEGEGRPYEGTQTAKLKVTKGGPLPFAWD
ILSPQFMYGSKAYVKHPADIPDYLKLSFPEGFKWERVMNFEDGGVVTVTQDSSLQDGEFIYKVKLRGTNFPSDGPV
MQKKTMGWEASSERMYPEDGALKGEIKQRLKLKDGGHYDAEVKTTYKAKKPVQLPGAYNVNIKLDITSHNEDYTIV
EQYERAEGRHSTGGMDELYK
SEQ ID NO: 78
MDKKYSIGLDIGTNSVGWAVITDEYKVPSKKFKVLGNTDRHSIKKNLIGALLFDSGETAEATRLKRTARRRYTRRK
NRICYLQEIFSNEMAKVDDSFFHRLEESFLVEEDKKHERHPIFGNIVDEVAYHEKYPTIYHLRKKLVDSTDKADLR
LIYLALAHMIKFRGHFLIEGDLNPDNSDVDKLFIQLVQTYNQLFEENPINASGVDAKAILSARLSKSRRLENLIAQ
LPGEKKNGLFGNLIALSLGLTPNFKSNFDLAEDAKLQLSKDTYDDDLDNLLAQIGDQYADLFLAAKNLSDAILLSD
ILRVNTEITKAPLSASMIKRYDEHHQDLTLLKALVRQQLPEKYKEIFFDQSKNGYAGYIDGGASQEEFYKFIKPIL
EKMDGTEELLVKLNREDLLRKQRTFDNGSIPHQIHLGELHAILRRQEDFYPFLKDNREKIEKILTFRIPYYVGPLA
RGNSRFAWMTRKSEETITPWNFEEVVDKGASAQSFIERMTNFDKNLPNEKVLPKHSLLYEYFTVYNELTKVKYVTE
GMRKPAFLSGEQKKAIVDLLFKTNRKVTVKQLKEDYFKKIECFDSVEISGVEDRFNASLGTYHDLLKIIKDKDFLD
NEENEDILEDIVLTLTLFEDREMIEERLKTYAHLFDDKVMKQLKRRRYTGWGRLSRKLINGIRDKQSGKTILDFLK
SDGFANRNFMQLIHDDSLTFKEDIQKAQVSGQGDSLHEHIANLAGSPAIKKGILQTVKVVDELVKVMGRHKPENIV
IEMARENQTTQKGQKNSRERMKRIEEGIKELGSQILKEHPVENTQLQNEKLYLYYLQNGRDMYVDQELDINRLSDY
DVDHIVPQSFLKDDSIDNKVLTRSDKNRGKSDNVPSEEVVKKMKNYWRQLLNAKLITQRKFDNLTKAERGGLSELD
KAGFIKRQLVETRQITKHVAQILDSRMNTKYDENDKLIREVKVITLKSKLVSDFRKDFQFYKVREINNYHHAHDAY
LNAVVGTALIKKYPKLESEFVYGDYKVYDVRKMIAKSEQEIGKATAKYFFYSNIMNFFKTEITLANGEIRKRPLIE
TNGETGEIVWDKGRDFATVRKVLSMPQVNIVKKTEVQTGGFSKESILPKRNSDKLIARKKDWDPKKYGGFDSPTVA
YSVLVVAKVEKGKSKKLKSVKELLGITIMERSSFEKNPIDFLEAKGYKEVKKDLIIKLPKYSLFELENGRKRMLAS
AGELQKGNELALPSKYVNFLYLASHYEKLKGSPEDNEQKQLFVEQHKHYLDEIIEQISEFSKRVILADANLDKVLS
AYNKHRDKPIREQAENIIHLFTLINLGAPAAFKYFDTTIDRKRYTSTKEVLDATLIHQSITGLYETRIDLSQLGGD
APAPA
MVSKGEEDNMAIIKEFMRFKVHMEGSVNGHEFEIEGEGEGRPYEGTQTAKLKVTKGGPLPFAWD
ILSPQFMYGSKAYVKHPADIPDYLKLSFPEGFKWERVMNFEDGGVVTVTQDSSLQDGEFIYKVKLRGTNFPSDGPV
MQKKTMGWEASSERMYPEDGALKGEIKQRLKLKDGGHYDAEVKTTYKAKKPVQLPGAYNVNIKLDITSHNEDYTIV
EQYERAEGRHSTGGMDELYK
SEQ ID NO: 79
MDKKYSIGLDIGTNSVGWAVITDEYKVPSKKFKVLGNTDRHSIKKNLIGALLFDSGETAEATRLKRTARRRYTRRK
NRICYLQEIFSNEMAKVDDSFFHRLEESFLVEEDKKHERHPIFGNIVDEVAYHEKYPTIYHLRKKLVDSTDKADLR
LIYLALAHMIKFRGHFLIEGDLNPDNSDVDKLFIQLVQTYNQLFEENPINASGVDAKAILSARLSKSRRLENLIAQ
LPGEKKNGLFGNLIALSLGLTPNFKSNFDLAEDAKLQLSKDTYDDDLDNLLAQIGDQYADLFLAAKNLSDAILLSD
ILRVNTEITKAPLSASMIKRYDEHHQDLTLLKALVRQQLPEKYKEIFFDQSKNGYAGYIDGGASQEEFYKFIKPIL
EKMDGTEELLVKLNREDLLRKQRTFDNGSIPHQIHLGELHAILRRQEDFYPFLKDNREKIEKILTFRIPYYVGPLA
RGNSRFAWMTRKSEETITPWNFEEVVDKGASAQSFIERMTNFDKNLPNEKVLPKHSLLYEYFTVYNELTKVKYVTE
GMRKPAFLSGEQKKAIVDLLFKTNRKVTVKQLKEDYFKKIECFDSVEISGVEDRFNASLGTYHDLLKIIKDKDFLD
NEENEDILEDIVLTLTLFEDREMIEERLKTYAHLFDDKVMKQLKRRRYTGWGRLSRKLINGIRDKQSGKTILDFLK
SDGFANRNFMQLIHDDSLTFKEDIQKAQVSGQGDSLHEHIANLAGSPAIKKGILQTVKVVDELVKVMGRHKPENIV
IEMARENQTTQKGQKNSRERMKRIEEGIKELGSQILKEHPVENTQLQNEKLYLYYLQNGRDMYVDQELDINRLSDY
DVDHIVPQSFLKDDSIDNKVLTRSDKNRGKSDNVPSEEVVKKMKNYWRQLLNAKLITQRKFDNLTKAERGGLSELD
KAGFIKRQLVETRQITKHVAQILDSRMNTKYDENDKLIREVKVITLKSKLVSDFRKDFQFYKVREINNYHHAHDAY
LNAVVGTALIKKYPKLESEFVYGDYKVYDVRKMIAKSEQEIGKATAKYFFYSNIMNFFKTEITLANGEIRKRPLIE
TNGETGEIVWDKGRDFATVRKVLSMPQVNIVKKTEVQTGGFSKESILPKRNSDKLIARKKDWDPKKYGGFDSPTVA
YSVLVVAKVEKGKSKKLKSVKELLGITIMERSSFEKNPIDFLEAKGYKEVKKDLIIKLPKYSLFELENGRKRMLAS
AGELQKGNELALPSKYVNFLYLASHYEKLKGSPEDNEQKQLFVEQHKHYLDEIIEQISEFSKRVILADANLDKVLS
AYNKHRDKPIREQAENIIHLFTLINLGAPAAFKYFDTTIDRKRYTSTKEVLDATLIHQSITGLYETRIDLSQLGGD
APAPAPA
MVSKGEEDNMAIIKEFMRFKVHMEGSVNGHEFEIEGEGEGRPYEGTQTAKLKVTKGGPLPFAWD
ILSPQFMYGSKAYVKHPADIPDYLKLSFPEGFKWERVMNFEDGGVVTVTQDSSLQDGEFIYKVKLRGTNFPSDGPV
MQKKTMGWEASSERMYPEDGALKGEIKQRLKLKDGGHYDAEVKTTYKAKKPVQLPGAYNVNIKLDITSHNEDYTIV
EQYERAEGRHSTGGMDELYK
SEQ ID NO: 80
[sequence omitted]
APAPAPAPA
MVSKGEEDNMAIIKEFMRFKVHMEGSVNGHEFEIEGEGEGRPYEGTQTAKLKVTKGGPLPFAWD
ILSPQFMYGSKAYVKHPADIPDYLKLSFPEGFKWERVMNFEDGGVVTVTQDSSLQDGEFIYKVKLRGTNFPSDGPV
MQKKTMGWEASSERMYPEDGALKGEIKQRLKLKDGGHYDAEVKTTYKAKKPVQLPGAYNVNIKLDITSHNEDYTIV
EQYERAEGRHSTGGMDELYK
SEQ ID NO: 81
MDKKYSIGLDIGTNSVGWAVITDEYKVPSKKFKVLGNTDRHSIKKNLIGALLFDSGETAEATRLKRTARRRYTRRK
NRICYLQEIFSNEMAKVDDSFFHRLEESFLVEEDKKHERHPIFGNIVDEVAYHEKYPTIYHLRKKLVDSTDKADLR
LIYLALAHMIKFRGHFLIEGDLNPDNSDVDKLFIQLVQTYNQLFEENPINASGVDAKAILSARLSKSRRLENLIAQ
LPGEKKNGLFGNLIALSLGLTPNFKSNFDLAEDAKLQLSKDTYDDDLDNLLAQIGDQYADLFLAAKNLSDAILLSD
ILRVNTEITKAPLSASMIKRYDEHHQDLTLLKALVRQQLPEKYKEIFFDQSKNGYAGYIDGGASQEEFYKFIKPIL
EKMDGTEELLVKLNREDLLRKQRTFDNGSIPHQIHLGELHAILRRQEDFYPFLKDNREKIEKILTFRIPYYVGPLA
RGNSRFAWMTRKSEETITPWNFEEVVDKGASAQSFIERMTNFDKNLPNEKVLPKHSLLYEYFTVYNELTKVKYVTE
GMRKPAFLSGEQKKAIVDLLFKTNRKVTVKQLKEDYFKKIECFDSVEISGVEDRFNASLGTYHDLLKIIKDKDFLD
NEENEDILEDIVLTLTLFEDREMIEERLKTYAHLFDDKVMKQLKRRRYTGWGRLSRKLINGIRDKQSGKTILDFLK
SDGFANRNFMQLIHDDSLTFKEDIQKAQVSGQGDSLHEHIANLAGSPAIKKGILQTVKVVDELVKVMGRHKPENIV
IEMARENQTTQKGQKNSRERMKRIEEGIKELGSQILKEHPVENTQLQNEKLYLYYLQNGRDMYVDQELDINRLSDY
DVDHIVPQSFLKDDSIDNKVLTRSDKNRGKSDNVPSEEVVKKMKNYWRQLLNAKLITQRKFDNLTKAERGGLSELD
KAGFIKRQLVETRQITKHVAQILDSRMNTKYDENDKLIREVKVITLKSKLVSDFRKDFQFYKVREINNYHHAHDAY
LNAVVGTALIKKYPKLESEFVYGDYKVYDVRKMIAKSEQEIGKATAKYFFYSNIMNFFKTEITLANGEIRKRPLIE
TNGETGEIVWDKGRDFATVRKVLSMPQVNIVKKTEVQTGGFSKESILPKRNSDKLIARKKDWDPKKYGGFDSPTVA
YSVLVVAKVEKGKSKKLKSVKELLGITIMERSSFEKNPIDFLEAKGYKEVKKDLIIKLPKYSLFELENGRKRMLAS
AGELQKGNELALPSKYVNFLYLASHYEKLKGSPEDNEQKQLFVEQHKHYLDEIIEQISEFSKRVILADANLDKVLS
AYNKHRDKPIREQAENIIHLFTLTNLGAPAAFKYFDTTIDRKRYTSTKEVLDATLIHQSITGLYETRIDLSQLGGD
APAPAPAPAPA
MVSKGEEDNMAIIKEFMRFKVHMEGSVNGHEFEIEGEGEGRPYEGTQTAKLKVTKGGPLPFAWD
ILSPQFMYGSKAYVKHPADIPDYLKLSFPEGFKWERVMNFEDGGVVTVTQDSSLQDGEFIYKVKLRGTNFPSDGPV
MQKKTMGWEASSERMYPEDGALKGEIKQRLKLKDGGHYDAEVKTTYKAKKPVQLPGAYNVNIKLDITSHNEDYTIV
EQYERAEGRHSTGGMDELYK
SEQ ID NO: 82
MDKKYSIGLDIGTNSVGWAVITDEYKVPSKKFKVLGNTDRHSIKKNLIGALLFDSGETAEATRLKRTARRRYTRRK
NRICYLQEIFSNEMAKVDDSFFHRLEESFLVEEDKKHERHPIFGNIVDEVAYHEKYPTIYHLRKKLVDSTDKADLR
LIYLALAHMIKFRGHFLIEGDLNPDNSDVDKLFIQLVQTYNQLFEENPINASGVDAKAILSARLSKSRRLENLIAQ
LPGEKKNGLFGNLIALSLGLTPNFKSNFDLAEDAKLQLSKDTYDDDLDNLLAQIGDQYADLFLAAKNLSDAILLSD
ILRVNTEITKAPLSASMIKRYDEHHQDLTLLKALVRQQLPEKYKEIFFDQSKNGYAGYIDGGASQEEFYKFIKPIL
EKMDGTEELLVKLNREDLLRKQRTFDNGSIPHQIHLGELHAILRRQEDFYPFLKDNREKIEKILTFRIPYYVGPLA
RGNSRFAWMTRKSEETITPWNFEEVVDKGASAQSFIERMTNFDKNLPNEKVLPKHSLLYEYFTVYNELTKVKYVTE
GMRKPAFLSGEQKKAIVDLLFKTNRKVTVKQLKEDYFKKIECFDSVEISGVEDRFNASLGTYHDLLKIIKDKDFLD
NEENEDILEDIVLTLTLFEDREMIEERLKTYAHLFDDKVMKQLKRRRYTGWGRLSRKLINGIRDKQSGKTILDFLK
SDGFANRNFMQLIHDDSLTFKEDIQKAQVSGQGDSLHEHIANLAGSPAIKKGILQTVKVVDELVKVMGRHKPENIV
IEMARENQTTQKGQKNSRERMKRIEEGIKELGSQILKEHPVENTQLQNEKLYLYYLQNGRDMYVDQELDINRLSDY
DVDHIVPQSFLKDDSIDNKVLTRSDKNRGKSDNVPSEEVVKKMKNYWRQLLNAKLITQRKFDNLTKAERGGLSELD
KAGFIKRQLVETRQITKHVAQILDSRMNTKYDENDKLIREVKVITLKSKLVSDFRKDFQFYKVREINNYHHAHDAY
LNAVVGTALIKKYPKLESEFVYGDYKVYDVRKMIAKSEQEIGKATAKYFFYSNIMNFFKTEITLANGEIRKRPLIE
TNGETGEIVWDKGRDFATVRKVLSMPQVNIVKKTEVQTGGFSKESILPKRNSDKLIARKKDWDPKKYGGFDSPTVA
YSVLVVAKVEKGKSKKLKSVKELLGITIMERSSFEKNPIDFLEAKGYKEVKKDLIIKLPKYSLFELENGRKRMLAS
AGELQKGNELALPSKYVNFLYLASHYEKLKGSPEDNEQKQLFVEQHKHYLDEIIEQISEFSKRVILADANLDKVLS
AYNKHRDKPIREQAENIIHLFTLTNLGAPAAFKYFDTTIDRKRYTSTKEVLDATLIHQSITGLYETRIDLSQLGGD
APAPAPAPAPAPA
MVSKGEEDNMAIIKEFMRFKVHMEGSVNGHEFEIEGEGEGRPYEGTQTAKLKVTKGGPLPFAWD
ILSPQFMYGSKAYVKHPADIPDYLKLSFPEGFKWERVMNFEDGGVVTVTQDSSLQDGEFIYKVKLRGTNFPSDGPV
MQKKTMGWEASSERMYPEDGALKGEIKQRLKLKDGGHYDAEVKTTYKAKKPVQLPGAYNVNIKLDITSHNEDYTIV
EQYERAEGRHSTGGMDELYK
SEQ ID NO: 83
MDKKYSIGLDIGTNSVGWAVITDEYKVPSKKFKVLGNTDRHSIKKNLIGALLFDSGETAEATRLKRTARRRYTRRK
NRICYLQEIFSNEMAKVDDSFFHRLEESFLVEEDKKHERHPIFGNIVDEVAYHEKYPTIYHLRKKLVDSTDKADLR
LIYLALAHMIKFRGHFLIEGDLNPDNSDVDKLFIQLVQTYNQLFEENPINASGVDAKAILSARLSKSRRLENLIAQ
LPGEKKNGLFGNLIALSLGLTPNFKSNFDLAEDAKLQLSKDTYDDDLDNLLAQIGDQYADLFLAAKNLSDAILLSD
ILRVNTEITKAPLSASMIKRYDEHHQDLTLLKALVRQQLPEKYKEIFFDQSKNGYAGYIDGGASQEEFYKFIKPIL
EKMDGTEELLVKLNREDLLRKQRTFDNGSIPHQIHLGELHAILRRQEDFYPFLKDNREKIEKILTFRIPYYVGPLA
RGNSRFAWMTRKSEETITPWNFEEVVDKGASAQSFIERMTNFDKNLPNEKVLPKHSLLYEYFTVYNELTKVKYVTE
GMRKPAFLSGEQKKAIVDLLFKTNRKVTVKQLKEDYFKKIECFDSVEISGVEDRFNASLGTYHDLLKIIKDKDFLD
NEENEDILEDIVLTLTLFEDREMIEERLKTYAHLFDDKVMKQLKRRRYTGWGRLSRKLINGIRDKQSGKTILDFLK
SDGFANRNFMQLIHDDSLTFKEDIQKAQVSGQGDSLHEHIANLAGSPAIKKGILQTVKVVDELVKVMGRHKPENIV
IEMARENQTTQKGQKNSRERMKRIEEGIKELGSQILKEHPVENTQLQNEKLYLYYLQNGRDMYVDQELDINRLSDY
DVDHIVPQSFLKDDSIDNKVLTRSDKNRGKSDNVPSEEVVKKMKNYWRQLLNAKLITQRKFDNLTKAERGGLSELD
KAGFIKRQLVETRQITKHVAQILDSRMNTKYDENDKLIREVKVITLKSKLVSDFRKDFQFYKVREINNYHHAHDAY
LNAVVGTALIKKYPKLESEFVYGDYKVYDVRKMIAKSEQEIGKATAKYFFYSNIMNFFKTEITLANGEIRKRPLIE
TNGETGEIVWDKGRDFATVRKVLSMPQVNIVKKTEVQTGGFSKESILPKRNSDKLIARKKDWDPKKYGGFDSPTVA
YSVLVVAKVEKGKSKKLKSVKELLGITIMERSSFEKNPIDFLEAKGYKEVKKDLIIKLPKYSLFELENGRKRMLAS
AGELQKGNELALPSKYVNFLYLASHYEKLKGSPEDNEQKQLFVEQHKHYLDEIIEQISEFSKRVILADANLDKVLS
AYNKHRDKPIREQAENIIHLFTLTNLGAPAAFKYFDTTIDRKRYTSTKEVLDATLIHQSITGLYETRIDLSQLGGD
APAPAPAPAPAPAPA
MVSKGEEDNMAIIKEFMRFKVHMEGSVNGHEFEIEGEGEGRPYEGTQTAKLKVTKGGPLPFAWD
ILSPQFMYGSKAYVKHPADIPDYLKLSFPEGFKWERVMNFEDGGVVTVTQDSSLQDGEFIYKVKLRGTNFPSDGPV
MQKKTMGWEASSERMYPEDGALKGEIKQRLKLKDGGHYDAEVKTTYKAKKPVQLPGAYNVNIKLDITSHNEDYTIV
EQYERAEGRHSTGGMDELYK
SEQ ID NO: 84
MDKKYSIGLDIGTNSVGWAVITDEYKVPSKKFKVLGNTDRHSIKKNLIGALLFDSGETAEATRLKRTARRRYTRRK
NRICYLQEIFSNEMAKVDDSFFHRLEESFLVEEDKKHERHPIFGNIVDEVAYHEKYPTIYHLRKKLVDSTDKADLR
LIYLALAHMIKFRGHFLIEGDLNPDNSDVDKLFIQLVQTYNQLFEENPINASGVDAKAILSARLSKSRRLENLIAQ
LPGEKKNGLFGNLIALSLGLTPNFKSNFDLAEDAKLQLSKDTYDDDLDNLLAQIGDQYADLFLAAKNLSDAILLSD
ILRVNTEITKAPLSASMIKRYDEHHQDLTLLKALVRQQLPEKYKEIFFDQSKNGYAGYIDGGASQEEFYKFIKPIL
EKMDGTEELLVKLNREDLLRKQRTFDNGSIPHQIHLGELHAILRRQEDFYPFLKDNREKIEKILTFRIPYYVGPLA
RGNSRFAWMTRKSEETITPWNFEEVVDKGASAQSFIERMTNFDKNLPNEKVLPKHSLLYEYFTVYNELTKVKYVTE
GMRKPAFLSGEQKKAIVDLLFKTNRKVTVKQLKEDYFKKIECFDSVEISGVEDRFNASLGTYHDLLKIIKDKDFLD
NEENEDILEDIVLTLTLFEDREMIEERLKTYAHLFDDKVMKQLKRRRYTGWGRLSRKLINGIRDKQSGKTILDFLK
SDGFANRNFMQLIHDDSLTFKEDIQKAQVSGQGDSLHEHIANLAGSPAIKKGILQTVKVVDELVKVMGRHKPENIV
IEMARENQTTQKGQKNSRERMKRIEEGIKELGSQILKEHPVENTQLQNEKLYLYYLQNGRDMYVDQELDINRLSDY
DVDHIVPQSFLKDDSIDNKVLTRSDKNRGKSDNVPSEEVVKKMKNYWRQLLNAKLITQRKFDNLTKAERGGLSELD
KAGFIKRQLVETRQITKHVAQILDSRMNTKYDENDKLIREVKVITLKSKLVSDFRKDFQFYKVREINNYHHAHDAY
LNAVVGTALIKKYPKLESEFVYGDYKVYDVRKMIAKSEQEIGKATAKYFFYSNIMNFFKTEITLANGEIRKRPLIE
TNGETGEIVWDKGRDFATVRKVLSMPQVNIVKKTEVQTGGFSKESILPKRNSDKLIARKKDWDPKKYGGFDSPTVA
YSVLVVAKVEKGKSKKLKSVKELLGITIMERSSFEKNPIDFLEAKGYKEVKKDLIIKLPKYSLFELENGRKRMLAS
AGELQKGNELALPSKYVNFLYLASHYEKLKGSPEDNEQKQLFVEQHKHYLDEIIEQISEFSKRVILADANLDKVLS
AYNKHRDKPIREQAENIIHLFTLTNLGAPAAFKYFDTTIDRKRYTSTKEVLDATLIHQSITGLYETRIDLSQLGGD
APAPAPAPAPAPAPAPA
MVSKGEEDNMAIIKEFMRFKVHMEGSVNGHEFEIEGEGEGRPYEGTQTAKLKVTKGGPLPFAWD
ILSPQFMYGSKAYVKHPADIPDYLKLSFPEGFKWERVMNFEDGGVVTVTQDSSLQDGEFIYKVKLRGTNFPSDGPV
MQKKTMGWEASSERMYPEDGALKGEIKQRLKLKDGGHYDAEVKTTYKAKKPVQLPGAYNVNIKLDITSHNEDYTIV
EQYERAEGRHSTGGMDELYK
SEQ ID NO: 85
MDKKYSIGLDIGTNSVGWAVITDEYKVPSKKFKVLGNTDRHSIKKNLIGALLFDSGETAEATRLKRTARRRYTRRK
NRICYLQEIFSNEMAKVDDSFFHRLEESFLVEEDKKHERHPIFGNIVDEVAYHEKYPTIYHLRKKLVDSTDKADLR
LIYLALAHMIKFRGHFLIEGDLNPDNSDVDKLFIQLVQTYNQLFEENPINASGVDAKAILSARLSKSRRLENLIAQ
LPGEKKNGLFGNLIALSLGLTPNFKSNFDLAEDAKLQLSKDTYDDDLDNLLAQIGDQYADLFLAAKNLSDAILLSD
ILRVNTEITKAPLSASMIKRYDEHHQDLTLLKALVRQQLPEKYKEIFFDQSKNGYAGYIDGGASQEEFYKFIKPIL
EKMDGTEELLVKLNREDLLRKQRTFDNGSIPHQIHLGELHAILRRQEDFYPFLKDNREKIEKILTFRIPYYVGPLA
RGNSRFAWMTRKSEETITPWNFEEVVDKGASAQSFIERMTNFDKNLPNEKVLPKHSLLYEYFTVYNELTKVKYVTE
GMRKPAFLSGEQKKAIVDLLFKTNRKVTVKQLKEDYFKKIECFDSVEISGVEDRFNASLGTYHDLLKIIKDKDFLD
NEENEDILEDIVLTLTLFEDREMIEERLKTYAHLFDDKVMKQLKRRRYTGWGRLSRKLINGIRDKQSGKTILDFLK
SDGFANRNFMQLIHDDSLTFKEDIQKAQVSGQGDSLHEHIANLAGSPAIKKGILQTVKVVDELVKVMGRHKPENIV
IEMARENQTTQKGQKNSRERMKRIEEGIKELGSQILKEHPVENTQLQNEKLYLYYLQNGRDMYVDQELDINRLSDY
DVDHIVPQSFLKDDSIDNKVLTRSDKNRGKSDNVPSEEVVKKMKNYWRQLLNAKLITQRKFDNLTKAERGGLSELD
KAGFIKRQLVETRQITKHVAQILDSRMNTKYDENDKLIREVKVITLKSKLVSDFRKDFQFYKVREINNYHHAHDAY
LNAVVGTALIKKYPKLESEFVYGDYKVYDVRKMIAKSEQEIGKATAKYFFYSNIMNFFKTEITLANGEIRKRPLIE
TNGETGEIVWDKGRDFATVRKVLSMPQVNIVKKTEVQTGGFSKESILPKRNSDKLIARKKDWDPKKYGGFDSPTVA
YSVLVVAKVEKGKSKKLKSVKELLGITIMERSSFEKNPIDFLEAKGYKEVKKDLIIKLPKYSLFELENGRKRMLAS
AGELQKGNELALPSKYVNFLYLASHYEKLKGSPEDNEQKQLFVEQHKHYLDEIIEQISEFSKRVILADANLDKVLS
AYNKHRDKPIREQAENIIHLFTLTNLGAPAAFKYFDTTIDRKRYTSTKEVLDATLIHQSITGLYETRIDLSQLGGD
APAPAPAPAPAPAPAPAPA
MVSKGEEDNMAIIKEFMRFKVHMEGSVNGHEFEIEGEGEGRPYEGTQTAKLKVTKGGPLPFAWD
ILSPQFMYGSKAYVKHPADIPDYLKLSFPEGFKWERVMNFEDGGVVTVTQDSSLQDGEFIYKVKLRGTNFPSDGPV
MQKKTMGWEASSERMYPEDGALKGEIKQRLKLKDGGHYDAEVKTTYKAKKPVQLPGAYNVNIKLDITSHNEDYTIV
EQYERAEGRHSTGGMDELYK
SEQ ID NO: 86
MDKKYSIGLDIGTNSVGWAVITDEYKVPSKKFKVLGNTDRHSIKKNLIGALLFDSGETAEATRLKRTARRRYTRRK
NRICYLQEIFSNEMAKVDDSFFHRLEESFLVEEDKKHERHPIFGNIVDEVAYHEKYPTIYHLRKKLVDSTDKADLR
LIYLALAHMIKFRGHFLIEGDLNPDNSDVDKLFIQLVQTYNQLFEENPINASGVDAKAILSARLSKSRRLENLIAQ
LPGEKKNGLFGNLIALSLGLTPNFKSNFDLAEDAKLQLSKDTYDDDLDNLLAQIGDQYADLFLAAKNLSDAILLSD
ILRVNTEITKAPLSASMIKRYDEHHQDLTLLKALVRQQLPEKYKEIFFDQSKNGYAGYIDGGASQEEFYKFIKPIL
EKMDGTEELLVKLNREDLLRKQRTFDNGSIPHQIHLGELHAILRRQEDFYPFLKDNREKIEKILTFRIPYYVGPLA
RGNSRFAWMTRKSEETITPWNFEEVVDKGASAQSFIERMTNFDKNLPNEKVLPKHSLLYEYFTVYNELTKVKYVTE
GMRKPAFLSGEQKKAIVDLLFKTNRKVTVKQLKEDYFKKIECFDSVEISGVEDRFNASLGTYHDLLKIIKDKDFLD
NEENEDILEDIVLTLTLFEDREMIEERLKTYAHLFDDKVMKQLKRRRYTGWGRLSRKLINGIRDKQSGKTILDFLK
SDGFANRNFMQLIHDDSLTFKEDIQKAQVSGQGDSLHEHIANLAGSPAIKKGILQTVKVVDELVKVMGRHKPENIV
IEMARENQTTQKGQKNSRERMKRIEEGIKELGSQILKEHPVENTQLQNEKLYLYYLQNGRDMYVDQELDINRLSDY
DVDHIVPQSFLKDDSIDNKVLTRSDKNRGKSDNVPSEEVVKKMKNYWRQLLNAKLITQRKFDNLTKAERGGLSELD
KAGFIKRQLVETRQITKHVAQILDSRMNTKYDENDKLIREVKVITLKSKLVSDFRKDFQFYKVREINNYHHAHDAY
LNAVVGTALIKKYPKLESEFVYGDYKVYDVRKMIAKSEQEIGKATAKYFFYSNIMNFFKTEITLANGEIRKRPLIE
TNGETGEIVWDKGRDFATVRKVLSMPQVNIVKKTEVQTGGFSKESILPKRNSDKLIARKKDWDPKKYGGFDSPTVA
YSVLVVAKVEKGKSKKLKSVKELLGITIMERSSFEKNPIDFLEAKGYKEVKKDLIIKLPKYSLFELENGRKRMLAS
AGELQKGNELALPSKYVNFLYLASHYEKLKGSPEDNEQKQLFVEQHKHYLDEIIEQISEFSKRVILADANLDKVLS
AYNKHRDKPIREQAENIIHLFTLINLGAPAAFKYFDTTIDRKRYTSTKEVLDATLIHQSITGLYETRIDLSQLGGD
APAPAPAPAPAPAPAPAPAPA
MVSKGEEDNMAIIKEFMRFKVHMEGSVNGHEFEIEGEGEGRPYEGTQTAKLKVTKGGPLPFAWD
ILSPQFMYGSKAYVKHPADIPDYLKLSFPEGFKWERVMNFEDGGVVTVTQDSSLQDGEFIYKVKLRGTNFPSDGPV
MQKKTMGWEASSERMYPEDGALKGEIKQRLKLKDGGHYDAEVKTTYKAKKPVQLPGAYNVNIKLDITSHNEDYTIV
EQYERAEGRHSTGGMDELYK
SEQ ID NO: 87
MDKKYSIGLDIGTNSVGWAVITDEYKVPSKKFKVLGNTDRHSIKKNLIGALLFDSGETAEATRLKRTARRRYTRRK
NRICYLQEIFSNEMAKVDDSFFHRLEESFLVEEDKKHERHPIFGNIVDEVAYHEKYPTIYHLRKKLVDSTDKADLR
LIYLALAHMIKFRGHFLIEGDLNPDNSDVDKLFIQLVQTYNQLFEENPINASGVDAKAILSARLSKSRRLENLIAQ
LPGEKKNGLFGNLIALSLGLTPNFKSNFDLAEDAKLQLSKDTYDDDLDNLLAQIGDQYADLFLAAKNLSDAILLSD
ILRVNTEITKAPLSASMIKRYDEHHQDLTLLKALVRQQLPEKYKEIFFDQSKNGYAGYIDGGASQEEFYKFIKPIL
EKMDGTEELLVKLNREDLLRKQRTFDNGSIPHQIHLGELHAILRRQEDFYPFLKDNREKIEKILTFRIPYYVGPLA
RGNSRFAWMTRKSEETITPWNFEEVVDKGASAQSFIERMTNFDKNLPNEKVLPKHSLLYEYFTVYNELTKVKYVTE
GMRKPAFLSGEQKKAIVDLLFKTNRKVTVKQLKEDYFKKIECFDSVEISGVEDRFNASLGTYHDLLKIIKDKDFLD
NEENEDILEDIVLTLTLFEDREMIEERLKTYAHLFDDKVMKQLKRRRYTGWGRLSRKLINGIRDKQSGKTILDFLK
SDGFANRNFMQLIHDDSLTFKEDIQKAQVSGQGDSLHEHIANLAGSPAIKKGILQTVKVVDELVKVMGRHKPENIV
IEMARENQTTQKGQKNSRERMKRIEEGIKELGSQILKEHPVENTQLQNEKLYLYYLQNGRDMYVDQELDINRLSDY
DVDHIVPQSFLKDDSIDNKVLTRSDKNRGKSDNVPSEEVVKKMKNYWRQLLNAKLITQRKFDNLTKAERGGLSELD
KAGFIKRQLVETRQITKHVAQILDSRMNTKYDENDKLIREVKVITLKSKLVSDFRKDFQFYKVREINNYHHAHDAY
LNAVVGTALIKKYPKLESEFVYGDYKVYDVRKMIAKSEQEIGKATAKYFFYSNIMNFFKTEITLANGEIRKRPLIE
TNGETGEIVWDKGRDFATVRKVLSMPQVNIVKKTEVQTGGFSKESILPKRNSDKLIARKKDWDPKKYGGFDSPTVA
YSVLVVAKVEKGKSKKLKSVKELLGITIMERSSFEKNPIDFLEAKGYKEVKKDLIIKLPKYSLFELENGRKRMLAS
AGELQKGNELALPSKYVNFLYLASHYEKLKGSPEDNEQKQLFVEQHKHYLDEIIEQISEFSKRVILADANLDKVLS
AYNKHRDKPIREQAENIIHLFTLINLGAPAAFKYFDTTIDRKRYTSTKEVLDATLIHQSITGLYETRIDLSQLGGD
APAPAPAPAPAPAPAPAPAPAPA
MVSKGEEDNMAIIKEFMRFKVHMEGSVNGHEFEIEGEGEGRPYEGTQTAKLKVTKGGPLPFAWD
ILSPQFMYGSKAYVKHPADIPDYLKLSFPEGFKWERVMNFEDGGVVTVTQDSSLQDGEFIYKVKLRGTNFPSDGPV
MQKKTMGWEASSERMYPEDGALKGEIKQRLKLKDGGHYDAEVKTTYKAKKPVQLPGAYNVNIKLDITSHNEDYTIV
EQYERAEGRHSTGGMDELYK
SEQ ID NO: 88
MDKKYSIGLDIGTNSVGWAVITDEYKVPSKKFKVLGNTDRHSIKKNLIGALLFDSGETAEATRLKRTARRRYTRRK
NRICYLQEIFSNEMAKVDDSFFHRLEESFLVEEDKKHERHPIFGNIVDEVAYHEKYPTIYHLRKKLVDSTDKADLR
LIYLALAHMIKFRGHFLIEGDLNPDNSDVDKLFIQLVQTYNQLFEENPINASGVDAKAILSARLSKSRRLENLIAQ
LPGEKKNGLFGNLIALSLGLTPNFKSNFDLAEDAKLQLSKDTYDDDLDNLLAQIGDQYADLFLAAKNLSDAILLSD
ILRVNTEITKAPLSASMIKRYDEHHQDLTLLKALVRQQLPEKYKEIFFDQSKNGYAGYIDGGASQEEFYKFIKPIL
EKMDGTEELLVKLNREDLLRKQRTFDNGSIPHQIHLGELHAILRRQEDFYPFLKDNREKIEKILTFRIPYYVGPLA
RGNSRFAWMTRKSEETITPWNFEEVVDKGASAQSFIERMTNFDKNLPNEKVLPKHSLLYEYFTVYNELTKVKYVTE
GMRKPAFLSGEQKKAIVDLLFKTNRKVTVKQLKEDYFKKIECFDSVEISGVEDRFNASLGTYHDLLKIIKDKDFLD
NEENEDILEDIVLTLTLFEDREMIEERLKTYAHLFDDKVMKQLKRRRYTGWGRLSRKLINGIRDKQSGKTILDFLK
SDGFANRNFMQLIHDDSLTFKEDIQKAQVSGQGDSLHEHIANLAGSPAIKKGILQTVKVVDELVKVMGRHKPENIV
IEMARENQTTQKGQKNSRERMKRIEEGIKELGSQILKEHPVENTQLQNEKLYLYYLQNGRDMYVDQELDINRLSDY
DVDHIVPQSFLKDDSIDNKVLTRSDKNRGKSDNVPSEEVVKKMKNYWRQLLNAKLITQRKFDNLTKAERGGLSELD
KAGFIKRQLVETRQITKHVAQILDSRMNTKYDENDKLIREVKVITLKSKLVSDFRKDFQFYKVREINNYHHAHDAY
LNAVVGTALIKKYPKLESEFVYGDYKVYDVRKMIAKSEQEIGKATAKYFFYSNIMNFFKTEITLANGEIRKRPLIE
TNGETGEIVWDKGRDFATVRKVLSMPQVNIVKKTEVQTGGFSKESILPKRNSDKLIARKKDWDPKKYGGFDSPTVA
YSVLVVAKVEKGKSKKLKSVKELLGITIMERSSFEKNPIDFLEAKGYKEVKKDLIIKLPKYSLFELENGRKRMLAS
AGELQKGNELALPSKYVNFLYLASHYEKLKGSPEDNEQKQLFVEQHKHYLDEIIEQISEFSKRVILADANLDKVLS
AYNKHRDKPIREQAENIIHLFTLINLGAPAAFKYFDTTIDRKRYTSTKEVLDATLIHQSITGLYETRIDLSQLGGD
APAPAPAPAPAPAPAPAPAPAPAPA
MVSKGEEDNMAIIKEFMRFKVHMEGSVNGHEFEIEGEGEGRPYEGTQTAKLKVTKGGPLPFAWD
ILSPQFMYGSKAYVKHPADIPDYLKLSFPEGFKWERVMNFEDGGVVTVTQDSSLQDGEFIYKVKLRGTNFPSDGPV
MQKKTMGWEASSERMYPEDGALKGEIKQRLKLKDGGHYDAEVKTTYKAKKPVQLPGAYNVNIKLDITSHNEDYTIV
EQYERAEGRHSTGGMDELYK
SEQ ID NO: 89
MDKKYSIGLDIGTNSVGWAVITDEYKVPSKKFKVLGNTDRHSIKKNLIGALLFDSGETAEATRLKRTARRRYTRRK
NRICYLQEIFSNEMAKVDDSFFHRLEESFLVEEDKKHERHPIFGNIVDEVAYHEKYPTIYHLRKKLVDSTDKADLR
LIYLALAHMIKFRGHFLIEGDLNPDNSDVDKLFIQLVQTYNQLFEENPINASGVDAKAILSARLSKSRRLENLIAQ
LPGEKKNGLFGNLIALSLGLTPNFKSNFDLAEDAKLQLSKDTYDDDLDNLLAQIGDQYADLFLAAKNLSDAILLSD
ILRVNTEITKAPLSASMIKRYDEHHQDLTLLKALVRQQLPEKYKEIFFDQSKNGYAGYIDGGASQEEFYKFIKPIL
EKMDGTEELLVKLNREDLLRKQRTFDNGSIPHQIHLGELHAILRRQEDFYPFLKDNREKIEKILTFRIPYYVGPLA
RGNSRFAWMTRKSEETITPWNFEEVVDKGASAQSFIERMTNFDKNLPNEKVLPKHSLLYEYFTVYNELTKVKYVTE
GMRKPAFLSGEQKKAIVDLLFKTNRKVTVKQLKEDYFKKIECFDSVEISGVEDRFNASLGTYHDLLKIIKDKDFLD
NEENEDILEDIVLTLTLFEDREMIEERLKTYAHLFDDKVMKQLKRRRYTGWGRLSRKLINGIRDKQSGKTILDFLK
SDGFANRNFMQLIHDDSLTFKEDIQKAQVSGQGDSLHEHIANLAGSPAIKKGILQTVKVVDELVKVMGRHKPENIV
IEMARENQTTQKGQKNSRERMKRIEEGIKELGSQILKEHPVENTQLQNEKLYLYYLQNGRDMYVDQELDINRLSDY
DVDHIVPQSFLKDDSIDNKVLTRSDKNRGKSDNVPSEEVVKKMKNYWRQLLNAKLITQRKFDNLTKAERGGLSELD
KAGFIKRQLVETRQITKHVAQILDSRMNTKYDENDKLIREVKVITLKSKLVSDFRKDFQFYKVREINNYHHAHDAY
LNAVVGTALIKKYPKLESEFVYGDYKVYDVRKMIAKSEQEIGKATAKYFFYSNIMNFFKTEITLANGEIRKRPLIE
TNGETGEIVWDKGRDFATVRKVLSMPQVNIVKKTEVQTGGFSKESILPKRNSDKLIARKKDWDPKKYGGFDSPTVA
YSVLVVAKVEKGKSKKLKSVKELLGITIMERSSFEKNPIDFLEAKGYKEVKKDLIIKLPKYSLFELENGRKRMLAS
AGELQKGNELALPSKYVNFLYLASHYEKLKGSPEDNEQKQLFVEQHKHYLDEIIEQISEFSKRVILADANLDKVLS
AYNKHRDKPIREQAENIIHLFTLINLGAPAAFKYFDTTIDRKRYTSTKEVLDATLIHQSITGLYETRIDLSQLGGD
APAPAPAPAPAPAPAPAPAPAPAPAPA
MVSKGEEDNMAIIKEFMRFKVHMEGSVNGHEFEIEGEGEGRPYEGTQTAKLKVTKGGPLPFAWD
ILSPQFMYGSKAYVKHPADIPDYLKLSFPEGFKWERVMNFEDGGVVTVTQDSSLQDGEFIYKVKLRGTNFPSDGPV
MQKKTMGWEASSERMYPEDGALKGEIKQRLKLKDGGHYDAEVKTTYKAKKPVQLPGAYNVNIKLDITSHNEDYTIV
EQYERAEGRHSTGGMDELYK
SEQ ID NO: 90
MDKKYSIGLDIGTNSVGWAVITDEYKVPSKKFKVLGNTDRHSIKKNLIGALLFDSGETAEATRLKRTARRRYTRRK
NRICYLQEIFSNEMAKVDDSFFHRLEESFLVEEDKKHERHPIFGNIVDEVAYHEKYPTIYHLRKKLVDSTDKADLR
LIYLALAHMIKFRGHFLIEGDLNPDNSDVDKLFIQLVQTYNQLFEENPINASGVDAKAILSARLSKSRRLENLIAQ
LPGEKKNGLFGNLIALSLGLTPNFKSNFDLAEDAKLQLSKDTYDDDLDNLLAQIGDQYADLFLAAKNLSDAILLSD
ILRVNTEITKAPLSASMIKRYDEHHQDLTLLKALVRQQLPEKYKEIFFDQSKNGYAGYIDGGASQEEFYKFIKPIL
EKMDGTEELLVKLNREDLLRKQRTFDNGSIPHQIHLGELHAILRRQEDFYPFLKDNREKIEKILTFRIPYYVGPLA
RGNSRFAWMTRKSEETITPWNFEEVVDKGASAQSFIERMTNFDKNLPNEKVLPKHSLLYEYFTVYNELTKVKYVTE
GMRKPAFLSGEQKKAIVDLLFKTNRKVTVKQLKEDYFKKIECFDSVEISGVEDRFNASLGTYHDLLKIIKDKDFLD
NEENEDILEDIVLTLTLFEDREMIEERLKTYAHLFDDKVMKQLKRRRYTGWGRLSRKLINGIRDKQSGKTILDFLK
SDGFANRNFMQLIHDDSLTFKEDIQKAQVSGQGDSLHEHIANLAGSPAIKKGILQTVKVVDELVKVMGRHKPENIV
IEMARENQTTQKGQKNSRERMKRIEEGIKELGSQILKEHPVENTQLQNEKLYLYYLQNGRDMYVDQELDINRLSDY
DVDHIVPQSFLKDDSIDNKVLTRSDKNRGKSDNVPSEEVVKKMKNYWRQLLNAKLITQRKFDNLTKAERGGLSELD
KAGFIKRQLVETRQITKHVAQILDSRMNTKYDENDKLIREVKVITLKSKLVSDFRKDFQFYKVREINNYHHAHDAY
LNAVVGTALIKKYPKLESEFVYGDYKVYDVRKMIAKSEQEIGKATAKYFFYSNIMNFFKTEITLANGEIRKRPLIE
TNGETGEIVWDKGRDFATVRKVLSMPQVNIVKKTEVQTGGFSKESILPKRNSDKLIARKKDWDPKKYGGFDSPTVA
YSVLVVAKVEKGKSKKLKSVKELLGITIMERSSFEKNPIDFLEAKGYKEVKKDLIIKLPKYSLFELENGRKRMLAS
AGELQKGNELALPSKYVNFLYLASHYEKLKGSPEDNEQKQLFVEQHKHYLDEIIEQISEFSKRVILADANLDKVLS
AYNKHRDKPIREQAENIIHLFTLINLGAPAAFKYFDTTIDRKRYTSTKEVLDATLIHQSITGLYETRIDLSQLGGD
APAPAPAPAPAPAPAPAPAPAPAPAPAPA
MVSKGEEDNMAIIKEFMRFKVHMEGSVNGHEFEIEGEGEGRPYEGTQTAKLKVTKGGPLPFAWD
ILSPQFMYGSKAYVKHPADIPDYLKLSFPEGFKWERVMNFEDGGVVTVTQDSSLQDGEFIYKVKLRGTNFPSDGPV
MQKKTMGWEASSERMYPEDGALKGEIKQRLKLKDGGHYDAEVKTTYKAKKPVQLPGAYNVNIKLDITSHNEDYTIV
EQYERAEGRHSTGGMDELYK
SEQ ID NO: 91
[sequence omitted]
XP
MVSKGEEDNMAIIKEFMRFKVHMEGSVNGHEFEIEGEGEGRPYEGTQTAKLKVTKGGPLPFAWD
ILSPQFMYGSKAYVKHPADIPDYLKLSFPEGFKWERVMNFEDGGVVTVTQDSSLQDGEFIYKVKLRGTNFPSDGPV
MQKKTMGWEASSERMYPEDGALKGEIKQRLKLKDGGHYDAEVKTTYKAKKPVQLPGAYNVNIKLDITSHNEDYTIV
EQYERAEGRHSTGGMDELYK
SEQ ID NO: 92
[sequence omitted]
XPXP
MVSKGEEDNMAIIKEFMRFKVHMEGSVNGHEFEIEGEGEGRPYEGTQTAKLKVTKGGPLPFAWD
ILSPQFMYGSKAYVKHPADIPDYLKLSFPEGFKWERVMNFEDGGVVTVTQDSSLQDGEFIYKVKLRGTNFPSDGPV
MQKKTMGWEASSERMYPEDGALKGEIKQRLKLKDGGHYDAEVKTTYKAKKPVQLPGAYNVNIKLDITSHNEDYTIV
EQYERAEGRHSTGGMDELYK
SEQ ID NO: 93
MDKKYSIGLDIGTNSVGWAVITDEYKVPSKKFKVLGNTDRHSIKKNLIGALLFDSGETAEATRLKRTARRRYTRRK
NRICYLQEIFSNEMAKVDDSFFHRLEESFLVEEDKKHERHPIFGNIVDEVAYHEKYPTIYHLRKKLVDSTDKADLR
LIYLALAHMIKFRGHFLIEGDLNPDNSDVDKLFIQLVQTYNQLFEENPINASGVDAKAILSARLSKSRRLENLIAQ
LPGEKKNGLFGNLIALSLGLTPNFKSNFDLAEDAKLQLSKDTYDDDLDNLLAQIGDQYADLFLAAKNLSDAILLSD
ILRVNTEITKAPLSASMIKRYDEHHQDLTLLKALVRQQLPEKYKEIFFDQSKNGYAGYIDGGASQEEFYKFIKPIL
EKMDGTEELLVKLNREDLLRKQRTFDNGSIPHQIHLGELHAILRRQEDFYPFLKDNREKIEKILTFRIPYYVGPLA
RGNSRFAWMTRKSEETITPWNFEEVVDKGASAQSFIERMTNFDKNLPNEKVLPKHSLLYEYFTVYNELTKVKYVTE
GMRKPAFLSGEQKKAIVDLLFKTNRKVTVKQLKEDYFKKIECFDSVEISGVEDRFNASLGTYHDLLKIIKDKDFLD
NEENEDILEDIVLTLTLFEDREMIEERLKTYAHLFDDKVMKQLKRRRYTGWGRLSRKLINGIRDKQSGKTILDFLK
SDGFANRNFMQLIHDDSLTFKEDIQKAQVSGQGDSLHEHIANLAGSPAIKKGILQTVKVVDELVKVMGRHKPENIV
IEMARENQTTQKGQKNSRERMKRIEEGIKELGSQILKEHPVENTQLQNEKLYLYYLQNGRDMYVDQELDINRLSDY
DVDHIVPQSFLKDDSIDNKVLTRSDKNRGKSDNVPSEEVVKKMKNYWRQLLNAKLITQRKFDNLTKAERGGLSELD
KAGFIKRQLVETRQITKHVAQILDSRMNTKYDENDKLIREVKVITLKSKLVSDFRKDFQFYKVREINNYHHAHDAY
LNAVVGTALIKKYPKLESEFVYGDYKVYDVRKMIAKSEQEIGKATAKYFFYSNIMNFFKTEITLANGEIRKRPLIE
TNGETGEIVWDKGRDFATVRKVLSMPQVNIVKKTEVQTGGFSKESILPKRNSDKLIARKKDWDPKKYGGFDSPTVA
YSVLVVAKVEKGKSKKLKSVKELLGITIMERSSFEKNPIDFLEAKGYKEVKKDLIIKLPKYSLFELENGRKRMLAS
AGELQKGNELALPSKYVNFLYLASHYEKLKGSPEDNEQKQLFVEQHKHYLDEIIEQISEFSKRVILADANLDKVLS
AYNKHRDKPIREQAENIIHLFTLINLGAPAAFKYFDTTIDRKRYTSTKEVLDATLIHQSITGLYETRIDLSQLGGD
XPXPXP
MVSKGEEDNMAIIKEFMRFKVHMEGSVNGHEFEIEGEGEGRPYEGTQTAKLKVTKGGPLPFAWD
ILSPQFMYGSKAYVKHPADIPDYLKLSFPEGFKWERVMNFEDGGVVTVTQDSSLQDGEFIYKVKLRGTNFPSDGPV
MQKKTMGWEASSERMYPEDGALKGEIKQRLKLKDGGHYDAEVKTTYKAKKPVQLPGAYNVNIKLDITSHNEDYTIV
EQYERAEGRHSTGGMDELYK
SEQ ID NO: 94
MDKKYSIGLDIGTNSVGWAVITDEYKVPSKKFKVLGNTDRHSIKKNLIGALLFDSGETAEATRLKRTARRRYTRRK
NRICYLQEIFSNEMAKVDDSFFHRLEESFLVEEDKKHERHPIFGNIVDEVAYHEKYPTIYHLRKKLVDSTDKADLR
LIYLALAHMIKFRGHFLIEGDLNPDNSDVDKLFIQLVQTYNQLFEENPINASGVDAKAILSARLSKSRRLENLIAQ
LPGEKKNGLFGNLIALSLGLTPNFKSNFDLAEDAKLQLSKDTYDDDLDNLLAQIGDQYADLFLAAKNLSDAILLSD
ILRVNTEITKAPLSASMIKRYDEHHQDLTLLKALVRQQLPEKYKEIFFDQSKNGYAGYIDGGASQEEFYKFIKPIL
EKMDGTEELLVKLNREDLLRKQRTFDNGSIPHQIHLGELHAILRRQEDFYPFLKDNREKIEKILTFRIPYYVGPLA
RGNSRFAWMTRKSEETITPWNFEEVVDKGASAQSFIERMTNFDKNLPNEKVLPKHSLLYEYFTVYNELTKVKYVTE
GMRKPAFLSGEQKKAIVDLLFKTNRKVTVKQLKEDYFKKIECFDSVEISGVEDRFNASLGTYHDLLKIIKDKDFLD
NEENEDILEDIVLTLTLFEDREMIEERLKTYAHLFDDKVMKQLKRRRYTGWGRLSRKLINGIRDKQSGKTILDFLK
SDGFANRNFMQLIHDDSLTFKEDIQKAQVSGQGDSLHEHIANLAGSPAIKKGILQTVKVVDELVKVMGRHKPENIV
IEMARENQTTQKGQKNSRERMKRIEEGIKELGSQILKEHPVENTQLQNEKLYLYYLQNGRDMYVDQELDINRLSDY
DVDHIVPQSFLKDDSIDNKVLTRSDKNRGKSDNVPSEEVVKKMKNYWRQLLNAKLITQRKFDNLTKAERGGLSELD
KAGFIKRQLVETRQITKHVAQILDSRMNTKYDENDKLIREVKVITLKSKLVSDFRKDFQFYKVREINNYHHAHDAY
LNAVVGTALIKKYPKLESEFVYGDYKVYDVRKMIAKSEQEIGKATAKYFFYSNIMNFFKTEITLANGEIRKRPLIE
TNGETGEIVWDKGRDFATVRKVLSMPQVNIVKKTEVQTGGFSKESILPKRNSDKLIARKKDWDPKKYGGFDSPTVA
YSVLVVAKVEKGKSKKLKSVKELLGITIMERSSFEKNPIDFLEAKGYKEVKKDLIIKLPKYSLFELENGRKRMLAS
AGELQKGNELALPSKYVNFLYLASHYEKLKGSPEDNEQKQLFVEQHKHYLDEIIEQISEFSKRVILADANLDKVLS
AYNKHRDKPIREQAENIIHLFTLINLGAPAAFKYFDTTIDRKRYTSTKEVLDATLIHQSITGLYETRIDLSQLGGD
XPXPXPXP
MVSKGEEDNMAIIKEFMRFKVHMEGSVNGHEFEIEGEGEGRPYEGTQTAKLKVTKGGPLPFAWD
ILSPQFMYGSKAYVKHPADIPDYLKLSFPEGFKWERVMNFEDGGVVTVTQDSSLQDGEFIYKVKLRGTNFPSDGPV
MQKKTMGWEASSERMYPEDGALKGEIKQRLKLKDGGHYDAEVKTTYKAKKPVQLPGAYNVNIKLDITSHNEDYTIV
EQYERAEGRHSTGGMDELYK
SEQ ID NO: 95
MDKKYSIGLDIGTNSVGWAVITDEYKVPSKKFKVLGNTDRHSIKKNLIGALLFDSGETAEATRLKRTARRRYTRRK
NRICYLQEIFSNEMAKVDDSFFHRLEESFLVEEDKKHERHPIFGNIVDEVAYHEKYPTIYHLRKKLVDSTDKADLR
LIYLALAHMIKFRGHFLIEGDLNPDNSDVDKLFIQLVQTYNQLFEENPINASGVDAKAILSARLSKSRRLENLIAQ
LPGEKKNGLFGNLIALSLGLTPNFKSNFDLAEDAKLQLSKDTYDDDLDNLLAQIGDQYADLFLAAKNLSDAILLSD
ILRVNTEITKAPLSASMIKRYDEHHQDLTLLKALVRQQLPEKYKEIFFDQSKNGYAGYIDGGASQEEFYKFIKPIL
EKMDGTEELLVKLNREDLLRKQRTFDNGSIPHQIHLGELHAILRRQEDFYPFLKDNREKIEKILTFRIPYYVGPLA
RGNSRFAWMTRKSEETITPWNFEEVVDKGASAQSFIERMTNFDKNLPNEKVLPKHSLLYEYFTVYNELTKVKYVTE
GMRKPAFLSGEQKKAIVDLLFKTNRKVTVKQLKEDYFKKIECFDSVEISGVEDRFNASLGTYHDLLKIIKDKDFLD
NEENEDILEDIVLTLTLFEDREMIEERLKTYAHLFDDKVMKQLKRRRYTGWGRLSRKLINGIRDKQSGKTILDFLK
SDGFANRNFMQLIHDDSLTFKEDIQKAQVSGQGDSLHEHIANLAGSPAIKKGILQTVKVVDELVKVMGRHKPENIV
IEMARENQTTQKGQKNSRERMKRIEEGIKELGSQILKEHPVENTQLQNEKLYLYYLQNGRDMYVDQELDINRLSDY
DVDHIVPQSFLKDDSIDNKVLTRSDKNRGKSDNVPSEEVVKKMKNYWRQLLNAKLITQRKFDNLTKAERGGLSELD
KAGFIKRQLVETRQITKHVAQILDSRMNTKYDENDKLIREVKVITLKSKLVSDFRKDFQFYKVREINNYHHAHDAY
LNAVVGTALIKKYPKLESEFVYGDYKVYDVRKMIAKSEQEIGKATAKYFFYSNIMNFFKTEITLANGEIRKRPLIE
TNGETGEIVWDKGRDFATVRKVLSMPQVNIVKKTEVQTGGFSKESILPKRNSDKLIARKKDWDPKKYGGFDSPTVA
YSVLVVAKVEKGKSKKLKSVKELLGITIMERSSFEKNPIDFLEAKGYKEVKKDLIIKLPKYSLFELENGRKRMLAS
AGELQKGNELALPSKYVNFLYLASHYEKLKGSPEDNEQKQLFVEQHKHYLDEIIEQISEFSKRVILADANLDKVLS
AYNKHRDKPIREQAENIIHLFTLINLGAPAAFKYFDTTIDRKRYTSTKEVLDATLIHQSITGLYETRIDLSQLGGD
XPXPXPXPXP
MVSKGEEDNMAIIKEFMRFKVHMEGSVNGHEFEIEGEGEGRPYEGTQTAKLKVTKGGPLPFAWD
ILSPQFMYGSKAYVKHPADIPDYLKLSFPEGFKWERVMNFEDGGVVTVTQDSSLQDGEFIYKVKLRGTNFPSDGPV
MQKKTMGWEASSERMYPEDGALKGEIKQRLKLKDGGHYDAEVKTTYKAKKPVQLPGAYNVNIKLDITSHNEDYTIV
EQYERAEGRHSTGGMDELYK
SEQ ID NO: 96
MDKKYSIGLDIGTNSVGWAVITDEYKVPSKKFKVLGNTDRHSIKKNLIGALLFDSGETAEATRLKRTARRRYTRRK
NRICYLQEIFSNEMAKVDDSFFHRLEESFLVEEDKKHERHPIFGNIVDEVAYHEKYPTIYHLRKKLVDSTDKADLR
LIYLALAHMIKFRGHFLIEGDLNPDNSDVDKLFIQLVQTYNQLFEENPINASGVDAKAILSARLSKSRRLENLIAQ
LPGEKKNGLFGNLIALSLGLTPNFKSNFDLAEDAKLQLSKDTYDDDLDNLLAQIGDQYADLFLAAKNLSDAILLSD
ILRVNTEITKAPLSASMIKRYDEHHQDLTLLKALVRQQLPEKYKEIFFDQSKNGYAGYIDGGASQEEFYKFIKPIL
EKMDGTEELLVKLNREDLLRKQRTFDNGSIPHQIHLGELHAILRRQEDFYPFLKDNREKIEKILTFRIPYYVGPLA
RGNSRFAWMTRKSEETITPWNFEEVVDKGASAQSFIERMTNFDKNLPNEKVLPKHSLLYEYFTVYNELTKVKYVTE
GMRKPAFLSGEQKKAIVDLLFKTNRKVTVKQLKEDYFKKIECFDSVEISGVEDRFNASLGTYHDLLKIIKDKDFLD
NEENEDILEDIVLTLTLFEDREMIEERLKTYAHLFDDKVMKQLKRRRYTGWGRLSRKLINGIRDKQSGKTILDFLK
SDGFANRNFMQLIHDDSLTFKEDIQKAQVSGQGDSLHEHIANLAGSPAIKKGILQTVKVVDELVKVMGRHKPENIV
IEMARENQTTQKGQKNSRERMKRIEEGIKELGSQILKEHPVENTQLQNEKLYLYYLQNGRDMYVDQELDINRLSDY
DVDHIVPQSFLKDDSIDNKVLTRSDKNRGKSDNVPSEEVVKKMKNYWRQLLNAKLITQRKFDNLTKAERGGLSELD
KAGFIKRQLVETRQITKHVAQILDSRMNTKYDENDKLIREVKVITLKSKLVSDFRKDFQFYKVREINNYHHAHDAY
LNAVVGTALIKKYPKLESEFVYGDYKVYDVRKMIAKSEQEIGKATAKYFFYSNIMNFFKTEITLANGEIRKRPLIE
TNGETGEIVWDKGRDFATVRKVLSMPQVNIVKKTEVQTGGFSKESILPKRNSDKLIARKKDWDPKKYGGFDSPTVA
YSVLVVAKVEKGKSKKLKSVKELLGITIMERSSFEKNPIDFLEAKGYKEVKKDLIIKLPKYSLFELENGRKRMLAS
AGELQKGNELALPSKYVNFLYLASHYEKLKGSPEDNEQKQLFVEQHKHYLDEIIEQISEFSKRVILADANLDKVLS
AYNKHRDKPIREQAENIIHLFTLINLGAPAAFKYFDTTIDRKRYTSTKEVLDATLIHQSITGLYETRIDLSQLGGD
XPXPXPXPXPXP
MVSKGEEDNMAIIKEFMRFKVHMEGSVNGHEFEIEGEGEGRPYEGTQTAKLKVTKGGPLPFAWD
ILSPQFMYGSKAYVKHPADIPDYLKLSFPEGFKWERVMNFEDGGVVTVTQDSSLQDGEFIYKVKLRGTNFPSDGPV
MQKKTMGWEASSERMYPEDGALKGEIKQRLKLKDGGHYDAEVKTTYKAKKPVQLPGAYNVNIKLDITSHNEDYTIV
EQYERAEGRHSTGGMDELYK
SEQ ID NO: 97
MDKKYSIGLDIGTNSVGWAVITDEYKVPSKKFKVLGNTDRHSIKKNLIGALLFDSGETAEATRLKRTARRRYTRRK
NRICYLQEIFSNEMAKVDDSFFHRLEESFLVEEDKKHERHPIFGNIVDEVAYHEKYPTIYHLRKKLVDSTDKADLR
LIYLALAHMIKFRGHFLIEGDLNPDNSDVDKLFIQLVQTYNQLFEENPINASGVDAKAILSARLSKSRRLENLIAQ
LPGEKKNGLFGNLIALSLGLTPNFKSNFDLAEDAKLQLSKDTYDDDLDNLLAQIGDQYADLFLAAKNLSDAILLSD
ILRVNTEITKAPLSASMIKRYDEHHQDLTLLKALVRQQLPEKYKEIFFDQSKNGYAGYIDGGASQEEFYKFIKPIL
EKMDGTEELLVKLNREDLLRKQRTFDNGSIPHQIHLGELHAILRRQEDFYPFLKDNREKIEKILTFRIPYYVGPLA
RGNSRFAWMTRKSEETITPWNFEEVVDKGASAQSFIERMTNFDKNLPNEKVLPKHSLLYEYFTVYNELTKVKYVTE
GMRKPAFLSGEQKKAIVDLLFKTNRKVTVKQLKEDYFKKIECFDSVEISGVEDRFNASLGTYHDLLKIIKDKDFLD
NEENEDILEDIVLTLTLFEDREMIEERLKTYAHLFDDKVMKQLKRRRYTGWGRLSRKLINGIRDKQSGKTILDFLK
SDGFANRNFMQLIHDDSLTFKEDIQKAQVSGQGDSLHEHIANLAGSPAIKKGILQTVKVVDELVKVMGRHKPENIV
IEMARENQTTQKGQKNSRERMKRIEEGIKELGSQILKEHPVENTQLQNEKLYLYYLQNGRDMYVDQELDINRLSDY
DVDHIVPQSFLKDDSIDNKVLTRSDKNRGKSDNVPSEEVVKKMKNYWRQLLNAKLITQRKFDNLTKAERGGLSELD
KAGFIKRQLVETRQITKHVAQILDSRMNTKYDENDKLIREVKVITLKSKLVSDFRKDFQFYKVREINNYHHAHDAY
LNAVVGTALIKKYPKLESEFVYGDYKVYDVRKMIAKSEQEIGKATAKYFFYSNIMNFFKTEITLANGEIRKRPLIE
TNGETGEIVWDKGRDFATVRKVLSMPQVNIVKKTEVQTGGFSKESILPKRNSDKLIARKKDWDPKKYGGFDSPTVA
YSVLVVAKVEKGKSKKLKSVKELLGITIMERSSFEKNPIDFLEAKGYKEVKKDLIIKLPKYSLFELENGRKRMLAS
AGELQKGNELALPSKYVNFLYLASHYEKLKGSPEDNEQKQLFVEQHKHYLDEIIEQISEFSKRVILADANLDKVLS
AYNKHRDKPIREQAENIIHLFTLTNLGAPAAFKYFDTTIDRKRYTSTKEVLDATLIHQSITGLYETRIDLSQLGGD
XPXPXPXPXPXPXP
MVSKGEEDNMAIIKEFMRFKVHMEGSVNGHEFEIEGEGEGRPYEGTQTAKLKVTKGGPLPFAWD
ILSPQFMYGSKAYVKHPADIPDYLKLSFPEGFKWERVMNFEDGGVVTVTQDSSLQDGEFIYKVKLRGTNFPSDGPV
MQKKTMGWEASSERMYPEDGALKGEIKQRLKLKDGGHYDAEVKTTYKAKKPVQLPGAYNVNIKLDITSHNEDYTIV
EQYERAEGRHSTGGMDELYK
SEQ ID NO: 98
MDKKYSIGLDIGTNSVGWAVITDEYKVPSKKFKVLGNTDRHSIKKNLIGALLFDSGETAEATRLKRTARRRYTRRK
NRICYLQEIFSNEMAKVDDSFFHRLEESFLVEEDKKHERHPIFGNIVDEVAYHEKYPTIYHLRKKLVDSTDKADLR
LIYLALAHMIKFRGHFLIEGDLNPDNSDVDKLFIQLVQTYNQLFEENPINASGVDAKAILSARLSKSRRLENLIAQ
LPGEKKNGLFGNLIALSLGLTPNFKSNFDLAEDAKLQLSKDTYDDDLDNLLAQIGDQYADLFLAAKNLSDAILLSD
ILRVNTEITKAPLSASMIKRYDEHHQDLTLLKALVRQQLPEKYKEIFFDQSKNGYAGYIDGGASQEEFYKFIKPIL
EKMDGTEELLVKLNREDLLRKQRTFDNGSIPHQIHLGELHAILRRQEDFYPFLKDNREKIEKILTFRIPYYVGPLA
RGNSRFAWMTRKSEETITPWNFEEVVDKGASAQSFIERMTNFDKNLPNEKVLPKHSLLYEYFTVYNELTKVKYVTE
GMRKPAFLSGEQKKAIVDLLFKTNRKVTVKQLKEDYFKKIECFDSVEISGVEDRFNASLGTYHDLLKIIKDKDFLD
NEENEDILEDIVLTLTLFEDREMIEERLKTYAHLFDDKVMKQLKRRRYTGWGRLSRKLINGIRDKQSGKTILDFLK
SDGFANRNFMQLIHDDSLTFKEDIQKAQVSGQGDSLHEHIANLAGSPAIKKGILQTVKVVDELVKVMGRHKPENIV
IEMARENQTTQKGQKNSRERMKRIEEGIKELGSQILKEHPVENTQLQNEKLYLYYLQNGRDMYVDQELDINRLSDY
DVDHIVPQSFLKDDSIDNKVLTRSDKNRGKSDNVPSEEVVKKMKNYWRQLLNAKLITQRKFDNLTKAERGGLSELD
KAGFIKRQLVETRQITKHVAQILDSRMNTKYDENDKLIREVKVITLKSKLVSDFRKDFQFYKVREINNYHHAHDAY
LNAVVGTALIKKYPKLESEFVYGDYKVYDVRKMIAKSEQEIGKATAKYFFYSNIMNFFKTEITLANGEIRKRPLIE
TNGETGEIVWDKGRDFATVRKVLSMPQVNIVKKTEVQTGGFSKESILPKRNSDKLIARKKDWDPKKYGGFDSPTVA
YSVLVVAKVEKGKSKKLKSVKELLGITIMERSSFEKNPIDFLEAKGYKEVKKDLIIKLPKYSLFELENGRKRMLAS
AGELQKGNELALPSKYVNFLYLASHYEKLKGSPEDNEQKQLFVEQHKHYLDEIIEQISEFSKRVILADANLDKVLS
AYNKHRDKPIREQAENIIHLFTLTNLGAPAAFKYFDTTIDRKRYTSTKEVLDATLIHQSITGLYETRIDLSQLGGD
XPXPXPXPXPXPXPXP
MVSKGEEDNMAIIKEFMRFKVHMEGSVNGHEFEIEGEGEGRPYEGTQTAKLKVTKGGPLPFAWD
ILSPQFMYGSKAYVKHPADIPDYLKLSFPEGFKWERVMNFEDGGVVTVTQDSSLQDGEFIYKVKLRGTNFPSDGPV
MQKKTMGWEASSERMYPEDGALKGEIKQRLKLKDGGHYDAEVKTTYKAKKPVQLPGAYNVNIKLDITSHNEDYTIV
EQYERAEGRHSTGGMDELYK
SEQ ID NO: 99
MDKKYSIGLDIGTNSVGWAVITDEYKVPSKKFKVLGNTDRHSIKKNLIGALLFDSGETAEATRLKRTARRRYTRRK
NRICYLQEIFSNEMAKVDDSFFHRLEESFLVEEDKKHERHPIFGNIVDEVAYHEKYPTIYHLRKKLVDSTDKADLR
LIYLALAHMIKFRGHFLIEGDLNPDNSDVDKLFIQLVQTYNQLFEENPINASGVDAKAILSARLSKSRRLENLIAQ
LPGEKKNGLFGNLIALSLGLTPNFKSNFDLAEDAKLQLSKDTYDDDLDNLLAQIGDQYADLFLAAKNLSDAILLSD
ILRVNTEITKAPLSASMIKRYDEHHQDLTLLKALVRQQLPEKYKEIFFDQSKNGYAGYIDGGASQEEFYKFIKPIL
EKMDGTEELLVKLNREDLLRKQRTFDNGSIPHQIHLGELHAILRRQEDFYPFLKDNREKIEKILTFRIPYYVGPLA
RGNSRFAWMTRKSEETITPWNFEEVVDKGASAQSFIERMTNFDKNLPNEKVLPKHSLLYEYFTVYNELTKVKYVTE
GMRKPAFLSGEQKKAIVDLLFKTNRKVTVKQLKEDYFKKIECFDSVEISGVEDRFNASLGTYHDLLKIIKDKDFLD
NEENEDILEDIVLTLTLFEDREMIEERLKTYAHLFDDKVMKQLKRRRYTGWGRLSRKLINGIRDKQSGKTILDFLK
SDGFANRNFMQLIHDDSLTFKEDIQKAQVSGQGDSLHEHIANLAGSPAIKKGILQTVKVVDELVKVMGRHKPENIV
IEMARENQTTQKGQKNSRERMKRIEEGIKELGSQILKEHPVENTQLQNEKLYLYYLQNGRDMYVDQELDINRLSDY
DVDHIVPQSFLKDDSIDNKVLTRSDKNRGKSDNVPSEEVVKKMKNYWRQLLNAKLITQRKFDNLTKAERGGLSELD
KAGFIKRQLVETRQITKHVAQILDSRMNTKYDENDKLIREVKVITLKSKLVSDFRKDFQFYKVREINNYHHAHDAY
LNAVVGTALIKKYPKLESEFVYGDYKVYDVRKMIAKSEQEIGKATAKYFFYSNIMNFFKTEITLANGEIRKRPLIE
TNGETGEIVWDKGRDFATVRKVLSMPQVNIVKKTEVQTGGFSKESILPKRNSDKLIARKKDWDPKKYGGFDSPTVA
YSVLVVAKVEKGKSKKLKSVKELLGITIMERSSFEKNPIDFLEAKGYKEVKKDLIIKLPKYSLFELENGRKRMLAS
AGELQKGNELALPSKYVNFLYLASHYEKLKGSPEDNEQKQLFVEQHKHYLDEIIEQISEFSKRVILADANLDKVLS
AYNKHRDKPIREQAENIIHLFTLTNLGAPAAFKYFDTTIDRKRYTSTKEVLDATLIHQSITGLYETRIDLSQLGGD
XPXPXPXPXPXPXPXPXP
MVSKGEEDNMAIIKEFMRFKVHMEGSVNGHEFEIEGEGEGRPYEGTQTAKLKVTKGGPLPFAWD
ILSPQFMYGSKAYVKHPADIPDYLKLSFPEGFKWERVMNFEDGGVVTVTQDSSLQDGEFIYKVKLRGTNFPSDGPV
MQKKTMGWEASSERMYPEDGALKGEIKQRLKLKDGGHYDAEVKTTYKAKKPVQLPGAYNVNIKLDITSHNEDYTIV
EQYERAEGRHSTGGMDELYK
SEQ ID NO: 100
MDKKYSIGLDIGTNSVGWAVITDEYKVPSKKFKVLGNTDRHSIKKNLIGALLFDSGETAEATRLKRTARRRYTRRK
NRICYLQEIFSNEMAKVDDSFFHRLEESFLVEEDKKHERHPIFGNIVDEVAYHEKYPTIYHLRKKLVDSTDKADLR
LIYLALAHMIKFRGHFLIEGDLNPDNSDVDKLFIQLVQTYNQLFEENPINASGVDAKAILSARLSKSRRLENLIAQ
LPGEKKNGLFGNLIALSLGLTPNFKSNFDLAEDAKLQLSKDTYDDDLDNLLAQIGDQYADLFLAAKNLSDAILLSD
ILRVNTEITKAPLSASMIKRYDEHHQDLTLLKALVRQQLPEKYKEIFFDQSKNGYAGYIDGGASQEEFYKFIKPIL
EKMDGTEELLVKLNREDLLRKQRTFDNGSIPHQIHLGELHAILRRQEDFYPFLKDNREKIEKILTFRIPYYVGPLA
RGNSRFAWMTRKSEETITPWNFEEVVDKGASAQSFIERMTNFDKNLPNEKVLPKHSLLYEYFTVYNELTKVKYVTE
GMRKPAFLSGEQKKAIVDLLFKTNRKVTVKQLKEDYFKKIECFDSVEISGVEDRFNASLGTYHDLLKIIKDKDFLD
NEENEDILEDIVLTLTLFEDREMIEERLKTYAHLFDDKVMKQLKRRRYTGWGRLSRKLINGIRDKQSGKTILDFLK
SDGFANRNFMQLIHDDSLTFKEDIQKAQVSGQGDSLHEHIANLAGSPAIKKGILQTVKVVDELVKVMGRHKPENIV
IEMARENQTTQKGQKNSRERMKRIEEGIKELGSQILKEHPVENTQLQNEKLYLYYLQNGRDMYVDQELDINRLSDY
DVDHIVPQSFLKDDSIDNKVLTRSDKNRGKSDNVPSEEVVKKMKNYWRQLLNAKLITQRKFDNLTKAERGGLSELD
KAGFIKRQLVETRQITKHVAQILDSRMNTKYDENDKLIREVKVITLKSKLVSDFRKDFQFYKVREINNYHHAHDAY
LNAVVGTALIKKYPKLESEFVYGDYKVYDVRKMIAKSEQEIGKATAKYFFYSNIMNFFKTEITLANGEIRKRPLIE
TNGETGEIVWDKGRDFATVRKVLSMPQVNIVKKTEVQTGGFSKESILPKRNSDKLIARKKDWDPKKYGGFDSPTVA
YSVLVVAKVEKGKSKKLKSVKELLGITIMERSSFEKNPIDFLEAKGYKEVKKDLIIKLPKYSLFELENGRKRMLAS
AGELQKGNELALPSKYVNFLYLASHYEKLKGSPEDNEQKQLFVEQHKHYLDEIIEQISEFSKRVILADANLDKVLS
AYNKHRDKPIREQAENIIHLFTLTNLGAPAAFKYFDTTIDRKRYTSTKEVLDATLIHQSITGLYETRIDLSQLGGD
XPXPXPXPXPXPXPXPXPXP
MVSKGEEDNMAIIKEFMRFKVHMEGSVNGHEFEIEGEGEGRPYEGTQTAKLKVTKGGPLPFAWD
ILSPQFMYGSKAYVKHPADIPDYLKLSFPEGFKWERVMNFEDGGVVTVTQDSSLQDGEFIYKVKLRGTNFPSDGPV
MQKKTMGWEASSERMYPEDGALKGEIKQRLKLKDGGHYDAEVKTTYKAKKPVQLPGAYNVNIKLDITSHNEDYTIV
EQYERAEGRHSTGGMDELYK
SEQ ID NO: 101
MDKKYSIGLDIGTNSVGWAVITDEYKVPSKKFKVLGNTDRHSIKKNLIGALLFDSGETAEATRLKRTARRRYTRRK
NRICYLQEIFSNEMAKVDDSFFHRLEESFLVEEDKKHERHPIFGNIVDEVAYHEKYPTIYHLRKKLVDSTDKADLR
LIYLALAHMIKFRGHFLIEGDLNPDNSDVDKLFIQLVQTYNQLFEENPINASGVDAKAILSARLSKSRRLENLIAQ
LPGEKKNGLFGNLIALSLGLTPNFKSNFDLAEDAKLQLSKDTYDDDLDNLLAQIGDQYADLFLAAKNLSDAILLSD
ILRVNTEITKAPLSASMIKRYDEHHQDLTLLKALVRQQLPEKYKEIFFDQSKNGYAGYIDGGASQEEFYKFIKPIL
EKMDGTEELLVKLNREDLLRKQRTFDNGSIPHQIHLGELHAILRRQEDFYPFLKDNREKIEKILTFRIPYYVGPLA
RGNSRFAWMTRKSEETITPWNFEEVVDKGASAQSFIERMTNFDKNLPNEKVLPKHSLLYEYFTVYNELTKVKYVTE
GMRKPAFLSGEQKKAIVDLLFKTNRKVTVKQLKEDYFKKIECFDSVEISGVEDRFNASLGTYHDLLKIIKDKDFLD
NEENEDILEDIVLTLTLFEDREMIEERLKTYAHLFDDKVMKQLKRRRYTGWGRLSRKLINGIRDKQSGKTILDFLK
SDGFANRNFMQLIHDDSLTFKEDIQKAQVSGQGDSLHEHIANLAGSPAIKKGILQTVKVVDELVKVMGRHKPENIV
IEMARENQTTQKGQKNSRERMKRIEEGIKELGSQILKEHPVENTQLQNEKLYLYYLQNGRDMYVDQELDINRLSDY
DVDHIVPQSFLKDDSIDNKVLTRSDKNRGKSDNVPSEEVVKKMKNYWRQLLNAKLITQRKFDNLTKAERGGLSELD
KAGFIKRQLVETRQITKHVAQILDSRMNTKYDENDKLIREVKVITLKSKLVSDFRKDFQFYKVREINNYHHAHDAY
LNAVVGTALIKKYPKLESEFVYGDYKVYDVRKMIAKSEQEIGKATAKYFFYSNIMNFFKTEITLANGEIRKRPLIE
TNGETGEIVWDKGRDFATVRKVLSMPQVNIVKKTEVQTGGFSKESILPKRNSDKLIARKKDWDPKKYGGFDSPTVA
YSVLVVAKVEKGKSKKLKSVKELLGITIMERSSFEKNPIDFLEAKGYKEVKKDLIIKLPKYSLFELENGRKRMLAS
AGELQKGNELALPSKYVNFLYLASHYEKLKGSPEDNEQKQLFVEQHKHYLDEIIEQISEFSKRVILADANLDKVLS
AYNKHRDKPIREQAENIIHLFTLINLGAPAAFKYFDTTIDRKRYTSTKEVLDATLIHQSITGLYETRIDLSQLGGD
XPXPXPXPXPXPXPXPXPXPXP
MVSKGEEDNMAIIKEFMRFKVHMEGSVNGHEFEIEGEGEGRPYEGTQTAKLKVTKGGPLPFAWD
ILSPQFMYGSKAYVKHPADIPDYLKLSFPEGFKWERVMNFEDGGVVTVTQDSSLQDGEFIYKVKLRGTNFPSDGPV
MQKKTMGWEASSERMYPEDGALKGEIKQRLKLKDGGHYDAEVKTTYKAKKPVQLPGAYNVNIKLDITSHNEDYTIV
EQYERAEGRHSTGGMDELYK
SEQ ID NO: 102
MDKKYSIGLDIGTNSVGWAVITDEYKVPSKKFKVLGNTDRHSIKKNLIGALLFDSGETAEATRLKRTARRRYTRRK
NRICYLQEIFSNEMAKVDDSFFHRLEESFLVEEDKKHERHPIFGNIVDEVAYHEKYPTIYHLRKKLVDSTDKADLR
LIYLALAHMIKFRGHFLIEGDLNPDNSDVDKLFIQLVQTYNQLFEENPINASGVDAKAILSARLSKSRRLENLIAQ
LPGEKKNGLFGNLIALSLGLTPNFKSNFDLAEDAKLQLSKDTYDDDLDNLLAQIGDQYADLFLAAKNLSDAILLSD
ILRVNTEITKAPLSASMIKRYDEHHQDLTLLKALVRQQLPEKYKEIFFDQSKNGYAGYIDGGASQEEFYKFIKPIL
EKMDGTEELLVKLNREDLLRKQRTFDNGSIPHQIHLGELHAILRRQEDFYPFLKDNREKIEKILTFRIPYYVGPLA
RGNSRFAWMTRKSEETITPWNFEEVVDKGASAQSFIERMTNFDKNLPNEKVLPKHSLLYEYFTVYNELTKVKYVTE
GMRKPAFLSGEQKKAIVDLLFKTNRKVTVKQLKEDYFKKIECFDSVEISGVEDRFNASLGTYHDLLKIIKDKDFLD
NEENEDILEDIVLTLTLFEDREMIEERLKTYAHLFDDKVMKQLKRRRYTGWGRLSRKLINGIRDKQSGKTILDFLK
SDGFANRNFMQLIHDDSLTFKEDIQKAQVSGQGDSLHEHIANLAGSPAIKKGILQTVKVVDELVKVMGRHKPENIV
IEMARENQTTQKGQKNSRERMKRIEEGIKELGSQILKEHPVENTQLQNEKLYLYYLQNGRDMYVDQELDINRLSDY
DVDHIVPQSFLKDDSIDNKVLTRSDKNRGKSDNVPSEEVVKKMKNYWRQLLNAKLITQRKFDNLTKAERGGLSELD
KAGFIKRQLVETRQITKHVAQILDSRMNTKYDENDKLIREVKVITLKSKLVSDFRKDFQFYKVREINNYHHAHDAY
LNAVVGTALIKKYPKLESEFVYGDYKVYDVRKMIAKSEQEIGKATAKYFFYSNIMNFFKTEITLANGEIRKRPLIE
TNGETGEIVWDKGRDFATVRKVLSMPQVNIVKKTEVQTGGFSKESILPKRNSDKLIARKKDWDPKKYGGFDSPTVA
YSVLVVAKVEKGKSKKLKSVKELLGITIMERSSFEKNPIDFLEAKGYKEVKKDLIIKLPKYSLFELENGRKRMLAS
AGELQKGNELALPSKYVNFLYLASHYEKLKGSPEDNEQKQLFVEQHKHYLDEIIEQISEFSKRVILADANLDKVLS
AYNKHRDKPIREQAENIIHLFTLINLGAPAAFKYFDTTIDRKRYTSTKEVLDATLIHQSITGLYETRIDLSQLGGD
XPXPXPXPXPXPXPXPXPXPXPXP
MVSKGEEDNMAIIKEFMRFKVHMEGSVNGHEFEIEGEGEGRPYEGTQTAKLKVTKGGPLPFAWD
ILSPQFMYGSKAYVKHPADIPDYLKLSFPEGFKWERVMNFEDGGVVTVTQDSSLQDGEFIYKVKLRGTNFPSDGPV
MQKKTMGWEASSERMYPEDGALKGEIKQRLKLKDGGHYDAEVKTTYKAKKPVQLPGAYNVNIKLDITSHNEDYTIV
EQYERAEGRHSTGGMDELYK
SEQ ID NO: 103
MDKKYSIGLDIGTNSVGWAVITDEYKVPSKKFKVLGNTDRHSIKKNLIGALLFDSGETAEATRLKRTARRRYTRRK
NRICYLQEIFSNEMAKVDDSFFHRLEESFLVEEDKKHERHPIFGNIVDEVAYHEKYPTIYHLRKKLVDSTDKADLR
LIYLALAHMIKFRGHFLIEGDLNPDNSDVDKLFIQLVQTYNQLFEENPINASGVDAKAILSARLSKSRRLENLIAQ
LPGEKKNGLFGNLIALSLGLTPNFKSNFDLAEDAKLQLSKDTYDDDLDNLLAQIGDQYADLFLAAKNLSDAILLSD
ILRVNTEITKAPLSASMIKRYDEHHQDLTLLKALVRQQLPEKYKEIFFDQSKNGYAGYIDGGASQEEFYKFIKPIL
EKMDGTEELLVKLNREDLLRKQRTFDNGSIPHQIHLGELHAILRRQEDFYPFLKDNREKIEKILTFRIPYYVGPLA
RGNSRFAWMTRKSEETITPWNFEEVVDKGASAQSFIERMTNFDKNLPNEKVLPKHSLLYEYFTVYNELTKVKYVTE
GMRKPAFLSGEQKKAIVDLLFKTNRKVTVKQLKEDYFKKIECFDSVEISGVEDRFNASLGTYHDLLKIIKDKDFLD
NEENEDILEDIVLTLTLFEDREMIEERLKTYAHLFDDKVMKQLKRRRYTGWGRLSRKLINGIRDKQSGKTILDFLK
SDGFANRNFMQLIHDDSLTFKEDIQKAQVSGQGDSLHEHIANLAGSPAIKKGILQTVKVVDELVKVMGRHKPENIV
IEMARENQTTQKGQKNSRERMKRIEEGIKELGSQILKEHPVENTQLQNEKLYLYYLQNGRDMYVDQELDINRLSDY
DVDHIVPQSFLKDDSIDNKVLTRSDKNRGKSDNVPSEEVVKKMKNYWRQLLNAKLITQRKFDNLTKAERGGLSELD
KAGFIKRQLVETRQITKHVAQILDSRMNTKYDENDKLIREVKVITLKSKLVSDFRKDFQFYKVREINNYHHAHDAY
LNAVVGTALIKKYPKLESEFVYGDYKVYDVRKMIAKSEQEIGKATAKYFFYSNIMNFFKTEITLANGEIRKRPLIE
TNGETGEIVWDKGRDFATVRKVLSMPQVNIVKKTEVQTGGFSKESILPKRNSDKLIARKKDWDPKKYGGFDSPTVA
YSVLVVAKVEKGKSKKLKSVKELLGITIMERSSFEKNPIDFLEAKGYKEVKKDLIIKLPKYSLFELENGRKRMLAS
AGELQKGNELALPSKYVNFLYLASHYEKLKGSPEDNEQKQLFVEQHKHYLDEIIEQISEFSKRVILADANLDKVLS
AYNKHRDKPIREQAENIIHLFTLINLGAPAAFKYFDTTIDRKRYTSTKEVLDATLIHQSITGLYETRIDLSQLGGD
XPXPXPXPXPXPXPXPXPXPXPXPXP
MVSKGEEDNMAIIKEFMRFKVHMEGSVNGHEFEIEGEGEGRPYEGTQTAKLKVTKGGPLPFAWD
ILSPQFMYGSKAYVKHPADIPDYLKLSFPEGFKWERVMNFEDGGVVTVTQDSSLQDGEFIYKVKLRGTNFPSDGPV
MQKKTMGWEASSERMYPEDGALKGEIKQRLKLKDGGHYDAEVKTTYKAKKPVQLPGAYNVNIKLDITSHNEDYTIV
EQYERAEGRHSTGGMDELYK
SEQ ID NO: 104
MDKKYSIGLDIGTNSVGWAVITDEYKVPSKKFKVLGNTDRHSIKKNLIGALLFDSGETAEATRLKRTARRRYTRRK
NRICYLQEIFSNEMAKVDDSFFHRLEESFLVEEDKKHERHPIFGNIVDEVAYHEKYPTIYHLRKKLVDSTDKADLR
LIYLALAHMIKFRGHFLIEGDLNPDNSDVDKLFIQLVQTYNQLFEENPINASGVDAKAILSARLSKSRRLENLIAQ
LPGEKKNGLFGNLIALSLGLTPNFKSNFDLAEDAKLQLSKDTYDDDLDNLLAQIGDQYADLFLAAKNLSDAILLSD
ILRVNTEITKAPLSASMIKRYDEHHQDLTLLKALVRQQLPEKYKEIFFDQSKNGYAGYIDGGASQEEFYKFIKPIL
EKMDGTEELLVKLNREDLLRKQRTFDNGSIPHQIHLGELHAILRRQEDFYPFLKDNREKIEKILTFRIPYYVGPLA
RGNSRFAWMTRKSEETITPWNFEEVVDKGASAQSFIERMTNFDKNLPNEKVLPKHSLLYEYFTVYNELTKVKYVTE
GMRKPAFLSGEQKKAIVDLLFKTNRKVTVKQLKEDYFKKIECFDSVEISGVEDRFNASLGTYHDLLKIIKDKDFLD
NEENEDILEDIVLTLTLFEDREMIEERLKTYAHLFDDKVMKQLKRRRYTGWGRLSRKLINGIRDKQSGKTILDFLK
SDGFANRNFMQLIHDDSLTFKEDIQKAQVSGQGDSLHEHIANLAGSPAIKKGILQTVKVVDELVKVMGRHKPENIV
IEMARENQTTQKGQKNSRERMKRIEEGIKELGSQILKEHPVENTQLQNEKLYLYYLQNGRDMYVDQELDINRLSDY
DVDHIVPQSFLKDDSIDNKVLTRSDKNRGKSDNVPSEEVVKKMKNYWRQLLNAKLITQRKFDNLTKAERGGLSELD
KAGFIKRQLVETRQITKHVAQILDSRMNTKYDENDKLIREVKVITLKSKLVSDFRKDFQFYKVREINNYHHAHDAY
LNAVVGTALIKKYPKLESEFVYGDYKVYDVRKMIAKSEQEIGKATAKYFFYSNIMNFFKTEITLANGEIRKRPLIE
TNGETGEIVWDKGRDFATVRKVLSMPQVNIVKKTEVQTGGFSKESILPKRNSDKLIARKKDWDPKKYGGFDSPTVA
YSVLVVAKVEKGKSKKLKSVKELLGITIMERSSFEKNPIDFLEAKGYKEVKKDLIIKLPKYSLFELENGRKRMLAS
AGELQKGNELALPSKYVNFLYLASHYEKLKGSPEDNEQKQLFVEQHKHYLDEIIEQISEFSKRVILADANLDKVLS
AYNKHRDKPIREQAENIIHLFTLINLGAPAAFKYFDTTIDRKRYTSTKEVLDATLIHQSITGLYETRIDLSQLGGD
XPXPXPXPXPXPXPXPXPXPXPXPXPXP
MVSKGEEDNMAIIKEFMRFKVHMEGSVNGHEFEIEGEGEGRPYEGTQTAKLKVTKGGPLPFAWD
ILSPQFMYGSKAYVKHPADIPDYLKLSFPEGFKWERVMNFEDGGVVTVTQDSSLQDGEFIYKVKLRGTNFPSDGPV
MQKKTMGWEASSERMYPEDGALKGEIKQRLKLKDGGHYDAEVKTTYKAKKPVQLPGAYNVNIKLDITSHNEDYTIV
EQYERAEGRHSTGGMDELYK
SEQ ID NO: 105
MDKKYSIGLDIGTNSVGWAVITDEYKVPSKKFKVLGNTDRHSIKKNLIGALLFDSGETAEATRLKRTARRRYTRRK
NRICYLQEIFSNEMAKVDDSFFHRLEESFLVEEDKKHERHPIFGNIVDEVAYHEKYPTIYHLRKKLVDSTDKADLR
LIYLALAHMIKFRGHFLIEGDLNPDNSDVDKLFIQLVQTYNQLFEENPINASGVDAKAILSARLSKSRRLENLIAQ
LPGEKKNGLFGNLIALSLGLTPNFKSNFDLAEDAKLQLSKDTYDDDLDNLLAQIGDQYADLFLAAKNLSDAILLSD
ILRVNTEITKAPLSASMIKRYDEHHQDLTLLKALVRQQLPEKYKEIFFDQSKNGYAGYIDGGASQEEFYKFIKPIL
EKMDGTEELLVKLNREDLLRKQRTFDNGSIPHQIHLGELHAILRRQEDFYPFLKDNREKIEKILTFRIPYYVGPLA
RGNSRFAWMTRKSEETITPWNFEEVVDKGASAQSFIERMTNFDKNLPNEKVLPKHSLLYEYFTVYNELTKVKYVTE
GMRKPAFLSGEQKKAIVDLLFKTNRKVTVKQLKEDYFKKIECFDSVEISGVEDRFNASLGTYHDLLKIIKDKDFLD
NEENEDILEDIVLTLTLFEDREMIEERLKTYAHLFDDKVMKQLKRRRYTGWGRLSRKLINGIRDKQSGKTILDFLK
SDGFANRNFMQLIHDDSLTFKEDIQKAQVSGQGDSLHEHIANLAGSPAIKKGILQTVKVVDELVKVMGRHKPENIV
IEMARENQTTQKGQKNSRERMKRIEEGIKELGSQILKEHPVENTQLQNEKLYLYYLQNGRDMYVDQELDINRLSDY
DVDHIVPQSFLKDDSIDNKVLTRSDKNRGKSDNVPSEEVVKKMKNYWRQLLNAKLITQRKFDNLTKAERGGLSELD
KAGFIKRQLVETRQITKHVAQILDSRMNTKYDENDKLIREVKVITLKSKLVSDFRKDFQFYKVREINNYHHAHDAY
LNAVVGTALIKKYPKLESEFVYGDYKVYDVRKMIAKSEQEIGKATAKYFFYSNIMNFFKTEITLANGEIRKRPLIE
TNGETGEIVWDKGRDFATVRKVLSMPQVNIVKKTEVQTGGFSKESILPKRNSDKLIARKKDWDPKKYGGFDSPTVA
YSVLVVAKVEKGKSKKLKSVKELLGITIMERSSFEKNPIDFLEAKGYKEVKKDLIIKLPKYSLFELENGRKRMLAS
AGELQKGNELALPSKYVNFLYLASHYEKLKGSPEDNEQKQLFVEQHKHYLDEIIEQISEFSKRVILADANLDKVLS
AYNKHRDKPIREQAENIIHLFTLINLGAPAAFKYFDTTIDRKRYTSTKEVLDATLIHQSITGLYETRIDLSQLGGD
GGGGSEAAAKGGGGS
MVSKGEEDNMAIIKEFMRFKVHMEGSVNGHEFEIEGEGEGRPYEGTQTAKLKVTKGGPLPFAWD
ILSPQFMYGSKAYVKHPADIPDYLKLSFPEGFKWERVMNFEDGGVVTVTQDSSLQDGEFIYKVKLRGTNFPSDGPV
MQKKTMGWEASSERMYPEDGALKGEIKQRLKLKDGGHYDAEVKTTYKAKKPVQLPGAYNVNIKLDITSHNEDYTIV
EQYERAEGRHSTGGMDELYK

[0097] Table V.3 provides chimera fusion proteins between AsCas12a amino acid sequences, linker amino acid sequences (underlined), and eGFP amino acid sequences (bolded, italicized).

TABLE V.3
AsCas12a-Linker-eGFP Chimeras

SEQ ID NO: 106
MTQFEGFTNLYQVSKTLRFELIPQGKTLKHIQEQGFIEEDKARNDHYKELKPIIDRIYKTYADQCLQLVQLDWENLS
AAIDSYRKEKTEETRNALIEEQATYRNAIHDYFIGRTDNLTDAINKRHAEIYKGLFKAELFNGKVLKQLGTVTTTEH
ENALLRSFDKFTTYFSGFYENRKNVFSAEDISTAIPHRIVQDNFPKFKENCHIFTRLITAVPSLREHFENVKKAIGI
FVSTSIEEVFSFPFYNQLLTQTQIDLYNQLLGGISREAGTEKIKGLNEVLNLAIQKNDETAHIIASLPHRFIPLFKQ
ILSDRNTLSFILEEFKSDEEVIQSFCKYKTLLRNENVLETAEALFNELNSIDLTHIFISHKKLETISSALCDHWDTL
RNALYERRISELTGKITKSAKEKVQRSLKHEDINLQEIISAAGKELSEAFKQKTSEILSHAHAALDQPLPTTLKKQE
EKEILKSQLDSLLGLYHLLDWFAVDESNEVDPEFSARLTGIKLEMEPSLSFYNKARNYATKKPYSVEKFKLNFQMPT
LASGWDVNKEKNNGAILFVKNGLYYLGIMPKQKGRYKALSFEPTEKTSEGFDKMYYDYFPDAAKMIPKCSTQLKAVT
AHFQTHTTPILLSNNFIEPLEITKEIYDLNNPEKEPKKFQTAYAKKTGDQKGYREALCKWIDFTRDFLSKYTKTTSI
DLSSLRPSSQYKDLGEYYAELNPLLYHISFQRIAEKEIMDAVETGKLYLFQIYNKDFAKGHHGKPNLHTLYWTGLFS
PENLAKTSIKLNGQAELFYRPKSRMKRMAHRLGEKMLNKKLKDQKTPIPDTLYQELYDYVNHRLSHDLSDEARALLP
NVITKEVSHEIIKDRRFTSDKFFFHVPITLNYQAANSPSKFNQRVNAYLKEHPETPIIGIDRGERNLIYITVIDSTG
KILEQRSLNTIQQFDYQKKLDNREKERVAARQAWSVVGTIKDLKQGYLSQVIHEIVDLMIHYQAVVVLENLNFGFKS
KRTGIAEKAVYQQFEKMLIDKLNCLVLKDYPAEKVGGVLNPYQLTDQFTSFAKMGTQSGFLFYVPAPYTSKIDPLTG
FVDPFVWKTIKNHESRKHFLEGFDFLHYDVKTGDFILHFKMNRNLSFQRGLPGFMPAWDIVFEKNETQFDAKGTPFI
AGKRIVPVIENHRFTGRYRDLYPANELIALLEEKGIVFRDGSNILPKLLENDDSHAIDTMVALIRSVLQMRNSNAAT
GEDYINSPVRDLNGVCFDSRFQNPEWPMDADANGAYHIALKGQLLLNHLKESKDLKLQNGISNQDWLAYIQELRN
GSAGSAAGSGEFMVSKGEELFTGVVPILVELDGDVNGHKFSVSGEGEGDATYGKLTLKFICTTGKLPVPWPTLVTT
LTYGVQCFSRYPDHMKQHDFFKSAMPEGYVQERTIFFKDDGNYKTRAEVKFEGDTLVNRIELKGIDFKEDGNILGH
KLEYNYNSHNVYIMADKQKNGIKVNFKIRHNIEDGSVQLADHYQQNTPIGDGPVLLPDNHYLSTQSALSKDPNEKR
DHMVLLEFVTAAGITLGMDELYK
SEQ ID NO: 107
MTQFEGFTNLYQVSKTLRFELIPQGKTLKHIQEQGFIEEDKARNDHYKELKPIIDRIYKTYADQCLQLVQLDWENLS
AAIDSYRKEKTEETRNALIEEQATYRNAIHDYFIGRTDNLTDAINKRHAEIYKGLFKAELFNGKVLKQLGTVTTTEH
ENALLRSFDKFTTYFSGFYENRKNVFSAEDISTAIPHRIVQDNFPKFKENCHIFTRLITAVPSLREHFENVKKAIGI
FVSTSIEEVFSFPFYNQLLTQTQIDLYNQLLGGISREAGTEKIKGLNEVLNLAIQKNDETAHIIASLPHRFIPLFKQ
ILSDRNTLSFILEEFKSDEEVIQSFCKYKTLLRNENVLETAEALFNELNSIDLTHIFISHKKLETISSALCDHWDTL
RNALYERRISELTGKITKSAKEKVQRSLKHEDINLQEIISAAGKELSEAFKQKTSEILSHAHAALDQPLPTTLKKQE
EKEILKSQLDSLLGLYHLLDWFAVDESNEVDPEFSARLTGIKLEMEPSLSFYNKARNYATKKPYSVEKFKLNFQMPT
LASGWDVNKEKNNGAILFVKNGLYYLGIMPKQKGRYKALSFEPTEKTSEGFDKMYYDYFPDAAKMIPKCSTQLKAVT
AHFQTHTTPILLSNNFIEPLEITKEIYDLNNPEKEPKKFQTAYAKKTGDQKGYREALCKWIDFTRDFLSKYTKTTSI
DLSSLRPSSQYKDLGEYYAELNPLLYHISFQRIAEKEIMDAVETGKLYLFQIYNKDFAKGHHGKPNLHTLYWTGLFS
PENLAKTSIKLNGQAELFYRPKSRMKRMAHRLGEKMLNKKLKDQKTPIPDTLYQELYDYVNHRLSHDLSDEARALLP
NVITKEVSHEIIKDRRFTSDKFFFHVPITLNYQAANSPSKFNQRVNAYLKEHPETPIIGIDRGERNLIYITVIDSTG
KILEQRSLNTIQQFDYQKKLDNREKERVAARQAWSVVGTIKDLKQGYLSQVIHEIVDLMIHYQAVVVLENLNFGFKS
KRTGIAEKAVYQQFEKMLIDKLNCLVLKDYPAEKVGGVLNPYQLTDQFTSFAKMGTQSGFLFYVPAPYTSKIDPLTG
FVDPFVWKTIKNHESRKHFLEGFDFLHYDVKTGDFILHFKMNRNLSFQRGLPGFMPAWDIVFEKNETQFDAKGTPFI
AGKRIVPVIENHRFTGRYRDLYPANELIALLEEKGIVFRDGSNILPKLLENDDSHAIDTMVALIRSVLQMRNSNAAT
GEDYINSPVRDLNGVCFDSRFQNPEWPMDADANGAYHIALKGQLLLNHLKESKDLKLQNGISNQDWLAYIQELRN
GGGGSGGGGSGGGGSGGGGS
MVSKGEELFTGVVPILVELDGDVNGHKFSVSGEGEGDATYGKLTLKFICTTGKLPVPWPTLVTT
LTYGVQCFSRYPDHMKQHDFFKSAMPEGYVQERTIFFKDDGNYKTRAEVKFEGDTLVNRIELKGIDFKEDGNILGH
KLEYNYNSHNVYIMADKQKNGIKVNFKIRHNIEDGSVQLADHYQQNTPIGDGPVLLPDNHYLSTQSALSKDPNEKR
DHMVLLEFVTAAGITLGMDELYK
SEQ ID NO: 108
MTQFEGFTNLYQVSKTLRFELIPQGKTLKHIQEQGFIEEDKARNDHYKELKPIIDRIYKTYADQCLQLVQLDWENLS
AAIDSYRKEKTEETRNALIEEQATYRNAIHDYFIGRTDNLTDAINKRHAEIYKGLFKAELFNGKVLKQLGTVTTTEH
ENALLRSFDKFTTYFSGFYENRKNVFSAEDISTAIPHRIVQDNFPKFKENCHIFTRLITAVPSLREHFENVKKAIGI
FVSTSIEEVFSFPFYNQLLTQTQIDLYNQLLGGISREAGTEKIKGLNEVLNLAIQKNDETAHIIASLPHRFIPLFKQ
ILSDRNTLSFILEEFKSDEEVIQSFCKYKTLLRNENVLETAEALFNELNSIDLTHIFISHKKLETISSALCDHWDTL
RNALYERRISELTGKITKSAKEKVQRSLKHEDINLQEIISAAGKELSEAFKQKTSEILSHAHAALDQPLPTTLKKQE
EKEILKSQLDSLLGLYHLLDWFAVDESNEVDPEFSARLTGIKLEMEPSLSFYNKARNYATKKPYSVEKFKLNFQMPT
LASGWDVNKEKNNGAILFVKNGLYYLGIMPKQKGRYKALSFEPTEKTSEGFDKMYYDYFPDAAKMIPKCSTQLKAVT
AHFQTHTTPILLSNNFIEPLEITKEIYDLNNPEKEPKKFQTAYAKKTGDQKGYREALCKWIDFTRDFLSKYTKTTSI
DLSSLRPSSQYKDLGEYYAELNPLLYHISFQRIAEKEIMDAVETGKLYLFQIYNKDFAKGHHGKPNLHTLYWTGLFS
PENLAKTSIKLNGQAELFYRPKSRMKRMAHRLGEKMLNKKLKDQKTPIPDTLYQELYDYVNHRLSHDLSDEARALLP
NVITKEVSHEIIKDRRFTSDKFFFHVPITLNYQAANSPSKFNQRVNAYLKEHPETPIIGIDRGERNLIYITVIDSTG
KILEQRSLNTIQQFDYQKKLDNREKERVAARQAWSVVGTIKDLKQGYLSQVIHEIVDLMIHYQAVVVLENLNFGFKS
KRTGIAEKAVYQQFEKMLIDKLNCLVLKDYPAEKVGGVLNPYQLTDQFTSFAKMGTQSGFLFYVPAPYTSKIDPLTG
FVDPFVWKTIKNHESRKHFLEGFDFLHYDVKTGDFILHFKMNRNLSFQRGLPGFMPAWDIVFEKNETQFDAKGTPFI
AGKRIVPVIENHRFTGRYRDLYPANELIALLEEKGIVFRDGSNILPKLLENDDSHAIDTMVALIRSVLQMRNSNAAT
GEDYINSPVRDLNGVCFDSRFQNPEWPMDADANGAYHIALKGQLLLNHLKESKDLKLQNGISNQDWLAYIQELRN
AEAAAKEAAAKEAAAKEAAAKA
MVSKGEELFTGVVPILVELDGDVNGHKFSVSGEGEGDATYGKLTLKFICTTGKLPVPWPTLVTT
LTYGVQCFSRYPDHMKQHDFFKSAMPEGYVQERTIFFKDDGNYKTRAEVKFEGDTLVNRIELKGIDFKEDGNILGH
KLEYNYNSHNVYIMADKQKNGIKVNFKIRHNIEDGSVQLADHYQQNTPIGDGPVLLPDNHYLSTQSALSKDPNEKR
DHMVLLEFVTAAGITLGMDELYK
SEQ ID NO: 109
MTQFEGFTNLYQVSKTLRFELIPQGKTLKHIQEQGFIEEDKARNDHYKELKPIIDRIYKTYADQCLQLVQLDWENLS
AAIDSYRKEKTEETRNALIEEQATYRNAIHDYFIGRTDNLTDAINKRHAEIYKGLFKAELFNGKVLKQLGTVTTTEH
ENALLRSFDKFTTYFSGFYENRKNVFSAEDISTAIPHRIVQDNFPKFKENCHIFTRLITAVPSLREHFENVKKAIGI
FVSTSIEEVFSFPFYNQLLTQTQIDLYNQLLGGISREAGTEKIKGLNEVLNLAIQKNDETAHIIASLPHRFIPLFKQ
ILSDRNTLSFILEEFKSDEEVIQSFCKYKTLLRNENVLETAEALFNELNSIDLTHIFISHKKLETISSALCDHWDTL
RNALYERRISELTGKITKSAKEKVQRSLKHEDINLQEIISAAGKELSEAFKQKTSEILSHAHAALDQPLPTTLKKQE
EKEILKSQLDSLLGLYHLLDWFAVDESNEVDPEFSARLTGIKLEMEPSLSFYNKARNYATKKPYSVEKFKLNFQMPT
LASGWDVNKEKNNGAILFVKNGLYYLGIMPKQKGRYKALSFEPTEKTSEGFDKMYYDYFPDAAKMIPKCSTQLKAVT
AHFQTHTTPILLSNNFIEPLEITKEIYDLNNPEKEPKKFQTAYAKKTGDQKGYREALCKWIDFTRDFLSKYTKTTSI
DLSSLRPSSQYKDLGEYYAELNPLLYHISFQRIAEKEIMDAVETGKLYLFQIYNKDFAKGHHGKPNLHTLYWTGLFS
PENLAKTSIKLNGQAELFYRPKSRMKRMAHRLGEKMLNKKLKDQKTPIPDTLYQELYDYVNHRLSHDLSDEARALLP
NVITKEVSHEIIKDRRFTSDKFFFHVPITLNYQAANSPSKFNQRVNAYLKEHPETPIIGIDRGERNLIYITVIDSTG
KILEQRSLNTIQQFDYQKKLDNREKERVAARQAWSVVGTIKDLKQGYLSQVIHEIVDLMIHYQAVVVLENLNFGFKS
KRTGIAEKAVYQQFEKMLIDKLNCLVLKDYPAEKVGGVLNPYQLTDQFTSFAKMGTQSGFLFYVPAPYTSKIDPLTG
FVDPFVWKTIKNHESRKHFLEGFDFLHYDVKTGDFILHFKMNRNLSFQRGLPGFMPAWDIVFEKNETQFDAKGTPFI
AGKRIVPVIENHRFTGRYRDLYPANELIALLEEKGIVFRDGSNILPKLLENDDSHAIDTMVALIRSVLQMRNSNAAT
GEDYINSPVRDLNGVCFDSRFQNPEWPMDADANGAYHIALKGQLLLNHLKESKDLKLQNGISNQDWLAYIQELRN
AEAAAKEAAAKEAAAKEAAAKALEAEAAAKEAAAKEAAAKEAAAKA
MVSKGEELFTGVVPILVELDGDVNGHKFSVSGEGEGDATYGKLTLKFICTTGKLPVPWPTLVTT
LTYGVQCFSRYPDHMKQHDFFKSAMPEGYVQERTIFFKDDGNYKTRAEVKFEGDTLVNRIELKGIDFKEDGNILGH
KLEYNYNSHNVYIMADKQKNGIKVNFKIRHNIEDGSVQLADHYQQNTPIGDGPVLLPDNHYLSTQSALSKDPNEKR
DHMVLLEFVTAAGITLGMDELYK
SEQ ID NO: 110
MTQFEGFTNLYQVSKTLRFELIPQGKTLKHIQEQGFIEEDKARNDHYKELKPIIDRIYKTYADQCLQLVQLDWENLS
AAIDSYRKEKTEETRNALIEEQATYRNAIHDYFIGRTDNLTDAINKRHAEIYKGLFKAELFNGKVLKQLGTVTTTEH
ENALLRSFDKFTTYFSGFYENRKNVFSAEDISTAIPHRIVQDNFPKFKENCHIFTRLITAVPSLREHFENVKKAIGI
FVSTSIEEVFSFPFYNQLLTQTQIDLYNQLLGGISREAGTEKIKGLNEVLNLAIQKNDETAHIIASLPHRFIPLFKQ
ILSDRNTLSFILEEFKSDEEVIQSFCKYKTLLRNENVLETAEALFNELNSIDLTHIFISHKKLETISSALCDHWDTL
RNALYERRISELTGKITKSAKEKVQRSLKHEDINLQEIISAAGKELSEAFKQKTSEILSHAHAALDQPLPTTLKKQE
EKEILKSQLDSLLGLYHLLDWFAVDESNEVDPEFSARLTGIKLEMEPSLSFYNKARNYATKKPYSVEKFKLNFQMPT
LASGWDVNKEKNNGAILFVKNGLYYLGIMPKQKGRYKALSFEPTEKTSEGFDKMYYDYFPDAAKMIPKCSTQLKAVT
AHFQTHTTPILLSNNFIEPLEITKEIYDLNNPEKEPKKFQTAYAKKTGDQKGYREALCKWIDFTRDFLSKYTKTTSI
DLSSLRPSSQYKDLGEYYAELNPLLYHISFQRIAEKEIMDAVETGKLYLFQIYNKDFAKGHHGKPNLHTLYWTGLFS
PENLAKTSIKLNGQAELFYRPKSRMKRMAHRLGEKMLNKKLKDQKTPIPDTLYQELYDYVNHRLSHDLSDEARALLP
NVITKEVSHEIIKDRRFTSDKFFFHVPITLNYQAANSPSKFNQRVNAYLKEHPETPIIGIDRGERNLIYITVIDSTG
KILEQRSLNTIQQFDYQKKLDNREKERVAARQAWSVVGTIKDLKQGYLSQVIHEIVDLMIHYQAVVVLENLNFGFKS
KRTGIAEKAVYQQFEKMLIDKLNCLVLKDYPAEKVGGVLNPYQLTDQFTSFAKMGTQSGFLFYVPAPYTSKIDPLTG
FVDPFVWKTIKNHESRKHFLEGFDFLHYDVKTGDFILHFKMNRNLSFQRGLPGFMPAWDIVFEKNETQFDAKGTPFI
AGKRIVPVIENHRFTGRYRDLYPANELIALLEEKGIVFRDGSNILPKLLENDDSHAIDTMVALIRSVLQMRNSNAAT
GEDYINSPVRDLNGVCFDSRFQNPEWPMDADANGAYHIALKGQLLLNHLKESKDLKLQNGISNQDWLAYIQELRN
LEAEAAAKEAAAKEAAAKEAAAKALEAEAAAKEAAAKEAAAKEAAAKALE
MVSKGEELFTGVVPILVELDGDVNGHKFSVSGEGEGDATYGKLTLKFICTTGKLPVPWPTLVTT
LTYGVQCFSRYPDHMKQHDFFKSAMPEGYVQERTIFFKDDGNYKTRAEVKFEGDTLVNRIELKGIDFKEDGNILGH
KLEYNYNSHNVYIMADKQKNGIKVNFKIRHNIEDGSVQLADHYQQNTPIGDGPVLLPDNHYLSTQSALSKDPNEKR
DHMVLLEFVTAAGITLGMDELYK
SEQ ID NO: 111
MTQFEGFTNLYQVSKTLRFELIPQGKTLKHIQEQGFIEEDKARNDHYKELKPIIDRIYKTYADQCLQLVQLDWENLS
AAIDSYRKEKTEETRNALIEEQATYRNAIHDYFIGRTDNLTDAINKRHAEIYKGLFKAELFNGKVLKQLGTVTTTEH
ENALLRSFDKFTTYFSGFYENRKNVFSAEDISTAIPHRIVQDNFPKFKENCHIFTRLITAVPSLREHFENVKKAIGI
FVSTSIEEVFSFPFYNQLLTQTQIDLYNQLLGGISREAGTEKIKGLNEVLNLAIQKNDETAHIIASLPHRFIPLFKQ
ILSDRNTLSFILEEFKSDEEVIQSFCKYKTLLRNENVLETAEALFNELNSIDLTHIFISHKKLETISSALCDHWDTL
RNALYERRISELTGKITKSAKEKVQRSLKHEDINLQEIISAAGKELSEAFKQKTSEILSHAHAALDQPLPTTLKKQE
EKEILKSQLDSLLGLYHLLDWFAVDESNEVDPEFSARLTGIKLEMEPSLSFYNKARNYATKKPYSVEKFKLNFQMPT
LASGWDVNKEKNNGAILFVKNGLYYLGIMPKQKGRYKALSFEPTEKTSEGFDKMYYDYFPDAAKMIPKCSTQLKAVT
AHFQTHTTPILLSNNFIEPLEITKEIYDLNNPEKEPKKFQTAYAKKTGDQKGYREALCKWIDFTRDFLSKYTKTTSI
DLSSLRPSSQYKDLGEYYAELNPLLYHISFQRIAEKEIMDAVETGKLYLFQIYNKDFAKGHHGKPNLHTLYWTGLFS
PENLAKTSIKLNGQAELFYRPKSRMKRMAHRLGEKMLNKKLKDQKTPIPDTLYQELYDYVNHRLSHDLSDEARALLP
NVITKEVSHEIIKDRRFTSDKFFFHVPITLNYQAANSPSKFNQRVNAYLKEHPETPIIGIDRGERNLIYITVIDSTG
KILEQRSLNTIQQFDYQKKLDNREKERVAARQAWSVVGTIKDLKQGYLSQVIHEIVDLMIHYQAVVVLENLNFGFKS
KRTGIAEKAVYQQFEKMLIDKLNCLVLKDYPAEKVGGVLNPYQLTDQFTSFAKMGTQSGFLFYVPAPYTSKIDPLTG
FVDPFVWKTIKNHESRKHFLEGFDFLHYDVKTGDFILHFKMNRNLSFQRGLPGFMPAWDIVFEKNETQFDAKGTPFI
AGKRIVPVIENHRFTGRYRDLYPANELIALLEEKGIVFRDGSNILPKLLENDDSHAIDTMVALIRSVLQMRNSNAAT
GEDYINSPVRDLNGVCFDSRFQNPEWPMDADANGAYHIALKGQLLLNHLKESKDLKLQNGISNQDWLAYIQELRN
APAMVSKGEELFTGVVPILVELDGDVNGHKFSVSGEGEGDATYGKLTLKFICTTGKLPVPWPTLVTT
LTYGVQCFSRYPDHMKQHDFFKSAMPEGYVQERTIFFKDDGNYKTRAEVKFEGDTLVNRIELKGIDFKEDGNILGH
KLEYNYNSHNVYIMADKQKNGIKVNFKIRHNIEDGSVQLADHYQQNTPIGDGPVLLPDNHYLSTQSALSKDPNEKR
DHMVLLEFVTAAGITLGMDELYK
SEQ ID NO: 112
MTQFEGFTNLYQVSKTLRFELIPQGKTLKHIQEQGFIEEDKARNDHYKELKPIIDRIYKTYADQCLQLVQLDWENLS
AAIDSYRKEKTEETRNALIEEQATYRNAIHDYFIGRTDNLTDAINKRHAEIYKGLFKAELFNGKVLKQLGTVTTTEH
ENALLRSFDKFTTYFSGFYENRKNVFSAEDISTAIPHRIVQDNFPKFKENCHIFTRLITAVPSLREHFENVKKAIGI
FVSTSIEEVFSFPFYNQLLTQTQIDLYNQLLGGISREAGTEKIKGLNEVLNLAIQKNDETAHIIASLPHRFIPLFKQ
ILSDRNTLSFILEEFKSDEEVIQSFCKYKTLLRNENVLETAEALFNELNSIDLTHIFISHKKLETISSALCDHWDTL
RNALYERRISELTGKITKSAKEKVQRSLKHEDINLQEIISAAGKELSEAFKQKTSEILSHAHAALDQPLPTTLKKQE
EKEILKSQLDSLLGLYHLLDWFAVDESNEVDPEFSARLTGIKLEMEPSLSFYNKARNYATKKPYSVEKFKLNFQMPT
LASGWDVNKEKNNGAILFVKNGLYYLGIMPKQKGRYKALSFEPTEKTSEGFDKMYYDYFPDAAKMIPKCSTQLKAVT
AHFQTHTTPILLSNNFIEPLEITKEIYDLNNPEKEPKKFQTAYAKKTGDQKGYREALCKWIDFTRDFLSKYTKTTSI
DLSSLRPSSQYKDLGEYYAELNPLLYHISFQRIAEKEIMDAVETGKLYLFQIYNKDFAKGHHGKPNLHTLYWTGLFS
PENLAKTSIKLNGQAELFYRPKSRMKRMAHRLGEKMLNKKLKDQKTPIPDTLYQELYDYVNHRLSHDLSDEARALLP
NVITKEVSHEIIKDRRFTSDKFFFHVPITLNYQAANSPSKFNQRVNAYLKEHPETPIIGIDRGERNLIYITVIDSTG
KILEQRSLNTIQQFDYQKKLDNREKERVAARQAWSVVGTIKDLKQGYLSQVIHEIVDLMIHYQAVVVLENLNFGFKS
KRTGIAEKAVYQQFEKMLIDKLNCLVLKDYPAEKVGGVLNPYQLTDQFTSFAKMGTQSGFLFYVPAPYTSKIDPLTG
FVDPFVWKTIKNHESRKHFLEGFDFLHYDVKTGDFILHFKMNRNLSFQRGLPGFMPAWDIVFEKNETQFDAKGTPFI
AGKRIVPVIENHRFTGRYRDLYPANELIALLEEKGIVFRDGSNILPKLLENDDSHAIDTMVALIRSVLQMRNSNAAT
GEDYINSPVRDLNGVCFDSRFQNPEWPMDADANGAYHIALKGQLLLNHLKESKDLKLQNGISNQDWLAYIQELRN
APAPAMVSKGEELFTGVVPILVELDGDVNGHKFSVSGEGEGDATYGKLTLKFICTTGKLPVPWPTLVTT
LTYGVQCFSRYPDHMKQHDFFKSAMPEGYVQERTIFFKDDGNYKTRAEVKFEGDTLVNRIELKGIDFKEDGNILGH
KLEYNYNSHNVYIMADKQKNGIKVNFKIRHNIEDGSVQLADHYQQNTPIGDGPVLLPDNHYLSTQSALSKDPNEKR
DHMVLLEFVTAAGITLGMDELYK
SEQ ID NO: 113
MTQFEGFTNLYQVSKTLRFELIPQGKTLKHIQEQGFIEEDKARNDHYKELKPIIDRIYKTYADQCLQLVQLDWENLS
AAIDSYRKEKTEETRNALIEEQATYRNAIHDYFIGRTDNLTDAINKRHAEIYKGLFKAELFNGKVLKQLGTVTTTEH
ENALLRSFDKFTTYFSGFYENRKNVFSAEDISTAIPHRIVQDNFPKFKENCHIFTRLITAVPSLREHFENVKKAIGI
FVSTSIEEVFSFPFYNQLLTQTQIDLYNQLLGGISREAGTEKIKGLNEVLNLAIQKNDETAHIIASLPHRFIPLFKQ
ILSDRNTLSFILEEFKSDEEVIQSFCKYKTLLRNENVLETAEALFNELNSIDLTHIFISHKKLETISSALCDHWDTL
RNALYERRISELTGKITKSAKEKVQRSLKHEDINLQEIISAAGKELSEAFKQKTSEILSHAHAALDQPLPTTLKKQE
EKEILKSQLDSLLGLYHLLDWFAVDESNEVDPEFSARLTGIKLEMEPSLSFYNKARNYATKKPYSVEKFKLNFQMPT
LASGWDVNKEKNNGAILFVKNGLYYLGIMPKQKGRYKALSFEPTEKTSEGFDKMYYDYFPDAAKMIPKCSTQLKAVT
AHFQTHTTPILLSNNFIEPLEITKEIYDLNNPEKEPKKFQTAYAKKTGDQKGYREALCKWIDFTRDFLSKYTKTTSI
DLSSLRPSSQYKDLGEYYAELNPLLYHISFQRIAEKEIMDAVETGKLYLFQIYNKDFAKGHHGKPNLHTLYWTGLFS
PENLAKTSIKLNGQAELFYRPKSRMKRMAHRLGEKMLNKKLKDQKTPIPDTLYQELYDYVNHRLSHDLSDEARALLP
NVITKEVSHEIIKDRRFTSDKFFFHVPITLNYQAANSPSKFNQRVNAYLKEHPETPIIGIDRGERNLIYITVIDSTG
KILEQRSLNTIQQFDYQKKLDNREKERVAARQAWSVVGTIKDLKQGYLSQVIHEIVDLMIHYQAVVVLENLNFGFKS
KRTGIAEKAVYQQFEKMLIDKLNCLVLKDYPAEKVGGVLNPYQLTDQFTSFAKMGTQSGFLFYVPAPYTSKIDPLTG
FVDPFVWKTIKNHESRKHFLEGFDFLHYDVKTGDFILHFKMNRNLSFQRGLPGFMPAWDIVFEKNETQFDAKGTPFI
AGKRIVPVIENHRFTGRYRDLYPANELIALLEEKGIVFRDGSNILPKLLENDDSHAIDTMVALIRSVLQMRNSNAAT
GEDYINSPVRDLNGVCFDSRFQNPEWPMDADANGAYHIALKGQLLLNHLKESKDLKLQNGISNQDWLAYIQELRN
APAPAPAMVSKGEELFTGVVPILVELDGDVNGHKFSVSGEGEGDATYGKLTLKFICTTGKLPVPWPTLVTT
LTYGVQCFSRYPDHMKQHDFFKSAMPEGYVQERTIFFKDDGNYKTRAEVKFEGDTLVNRIELKGIDFKEDGNILGH
KLEYNYNSHNVYIMADKQKNGIKVNFKIRHNIEDGSVQLADHYQQNTPIGDGPVLLPDNHYLSTQSALSKDPNEKR
DHMVLLEFVTAAGITLGMDELYK
SEQ ID NO: 114
MTQFEGFTNLYQVSKTLRFELIPQGKTLKHIQEQGFIEEDKARNDHYKELKPIIDRIYKTYADQCLQLVQLDWENLS
AAIDSYRKEKTEETRNALIEEQATYRNAIHDYFIGRTDNLTDAINKRHAEIYKGLFKAELFNGKVLKQLGTVTTTEH
ENALLRSFDKFTTYFSGFYENRKNVFSAEDISTAIPHRIVQDNFPKFKENCHIFTRLITAVPSLREHFENVKKAIGI
FVSTSIEEVFSFPFYNQLLTQTQIDLYNQLLGGISREAGTEKIKGLNEVLNLAIQKNDETAHIIASLPHRFIPLFKQ
ILSDRNTLSFILEEFKSDEEVIQSFCKYKTLLRNENVLETAEALFNELNSIDLTHIFISHKKLETISSALCDHWDTL
RNALYERRISELTGKITKSAKEKVQRSLKHEDINLQEIISAAGKELSEAFKQKTSEILSHAHAALDQPLPTTLKKQE
EKEILKSQLDSLLGLYHLLDWFAVDESNEVDPEFSARLTGIKLEMEPSLSFYNKARNYATKKPYSVEKFKLNFQMPT
LASGWDVNKEKNNGAILFVKNGLYYLGIMPKQKGRYKALSFEPTEKTSEGFDKMYYDYFPDAAKMIPKCSTQLKAVT
AHFQTHTTPILLSNNFIEPLEITKEIYDLNNPEKEPKKFQTAYAKKTGDQKGYREALCKWIDFTRDFLSKYTKTTSI
DLSSLRPSSQYKDLGEYYAELNPLLYHISFQRIAEKEIMDAVETGKLYLFQIYNKDFAKGHHGKPNLHTLYWTGLFS
PENLAKTSIKLNGQAELFYRPKSRMKRMAHRLGEKMLNKKLKDQKTPIPDTLYQELYDYVNHRLSHDLSDEARALLP
NVITKEVSHEIIKDRRFTSDKFFFHVPITLNYQAANSPSKFNQRVNAYLKEHPETPIIGIDRGERNLIYITVIDSTG
KILEQRSLNTIQQFDYQKKLDNREKERVAARQAWSVVGTIKDLKQGYLSQVIHEIVDLMIHYQAVVVLENLNFGFKS
KRTGIAEKAVYQQFEKMLIDKLNCLVLKDYPAEKVGGVLNPYQLTDQFTSFAKMGTQSGFLFYVPAPYTSKIDPLTG
FVDPFVWKTIKNHESRKHFLEGFDFLHYDVKTGDFILHFKMNRNLSFQRGLPGFMPAWDIVFEKNETQFDAKGTPFI
AGKRIVPVIENHRFTGRYRDLYPANELIALLEEKGIVFRDGSNILPKLLENDDSHAIDTMVALIRSVLQMRNSNAAT
GEDYINSPVRDLNGVCFDSRFQNPEWPMDADANGAYHIALKGQLLLNHLKESKDLKLQNGISNQDWLAYIQELRN
APAPAPAPAMVSKGEELFTGVVPILVELDGDVNGHKFSVSGEGEGDATYGKLTLKFICTTGKLPVPWPTLVTT
LTYGVQCFSRYPDHMKQHDFFKSAMPEGYVQERTIFFKDDGNYKTRAEVKFEGDTLVNRIELKGIDFKEDGNILGH
KLEYNYNSHNVYIMADKQKNGIKVNFKIRHNIEDGSVQLADHYQQNTPIGDGPVLLPDNHYLSTQSALSKDPNEKR
DHMVLLEFVTAAGITLGMDELYK
SEQ ID NO: 115
MTQFEGFTNLYQVSKTLRFELIPQGKTLKHIQEQGFIEEDKARNDHYKELKPIIDRIYKTYADQCLQLVQLDWENLS
AAIDSYRKEKTEETRNALIEEQATYRNAIHDYFIGRTDNLTDAINKRHAEIYKGLFKAELFNGKVLKQLGTVTTTEH
ENALLRSFDKFTTYFSGFYENRKNVFSAEDISTAIPHRIVQDNFPKFKENCHIFTRLITAVPSLREHFENVKKAIGI
FVSTSIEEVFSFPFYNQLLTQTQIDLYNQLLGGISREAGTEKIKGLNEVLNLAIQKNDETAHIIASLPHRFIPLFKQ
ILSDRNTLSFILEEFKSDEEVIQSFCKYKTLLRNENVLETAEALFNELNSIDLTHIFISHKKLETISSALCDHWDTL
RNALYERRISELTGKITKSAKEKVQRSLKHEDINLQEIISAAGKELSEAFKQKTSEILSHAHAALDQPLPTTLKKQE
EKEILKSQLDSLLGLYHLLDWFAVDESNEVDPEFSARLTGIKLEMEPSLSFYNKARNYATKKPYSVEKFKLNFQMPT
LASGWDVNKEKNNGAILFVKNGLYYLGIMPKQKGRYKALSFEPTEKTSEGFDKMYYDYFPDAAKMIPKCSTQLKAVT
AHFQTHTTPILLSNNFIEPLEITKEIYDLNNPEKEPKKFQTAYAKKTGDQKGYREALCKWIDFTRDFLSKYTKTTSI
DLSSLRPSSQYKDLGEYYAELNPLLYHISFQRIAEKEIMDAVETGKLYLFQIYNKDFAKGHHGKPNLHTLYWTGLFS
PENLAKTSIKLNGQAELFYRPKSRMKRMAHRLGEKMLNKKLKDQKTPIPDTLYQELYDYVNHRLSHDLSDEARALLP
NVITKEVSHEIIKDRRFTSDKFFFHVPITLNYQAANSPSKFNQRVNAYLKEHPETPIIGIDRGERNLIYITVIDSTG
KILEQRSLNTIQQFDYQKKLDNREKERVAARQAWSVVGTIKDLKQGYLSQVIHEIVDLMIHYQAVVVLENLNFGFKS
KRTGIAEKAVYQQFEKMLIDKLNCLVLKDYPAEKVGGVLNPYQLTDQFTSFAKMGTQSGFLFYVPAPYTSKIDPLTG
FVDPFVWKTIKNHESRKHFLEGFDFLHYDVKTGDFILHFKMNRNLSFQRGLPGFMPAWDIVFEKNETQFDAKGTPFI
AGKRIVPVIENHRFTGRYRDLYPANELIALLEEKGIVFRDGSNILPKLLENDDSHAIDTMVALIRSVLQMRNSNAAT
GEDYINSPVRDLNGVCFDSRFQNPEWPMDADANGAYHIALKGQLLLNHLKESKDLKLQNGISNQDWLAYIQELRN
APAPAPAPAPAMVSKGEELFTGVVPILVELDGDVNGHKFSVSGEGEGDATYGKLTLKFICTTGKLPVPWPTLVTT
LTYGVQCFSRYPDHMKQHDFFKSAMPEGYVQERTIFFKDDGNYKTRAEVKFEGDTLVNRIELKGIDFKEDGNILGH
KLEYNYNSHNVYIMADKQKNGIKVNFKIRHNIEDGSVQLADHYQQNTPIGDGPVLLPDNHYLSTQSALSKDPNEKR
DHMVLLEFVTAAGITLGMDELYK
SEQ ID NO: 116
MTQFEGFTNLYQVSKTLRFELIPQGKTLKHIQEQGFIEEDKARNDHYKELKPIIDRIYKTYADQCLQLVQLDWENLS
AAIDSYRKEKTEETRNALIEEQATYRNAIHDYFIGRTDNLTDAINKRHAEIYKGLFKAELFNGKVLKQLGTVTTTEH
ENALLRSFDKFTTYFSGFYENRKNVFSAEDISTAIPHRIVQDNFPKFKENCHIFTRLITAVPSLREHFENVKKAIGI
FVSTSIEEVFSFPFYNQLLTQTQIDLYNQLLGGISREAGTEKIKGLNEVLNLAIQKNDETAHIIASLPHRFIPLFKQ
ILSDRNTLSFILEEFKSDEEVIQSFCKYKTLLRNENVLETAEALFNELNSIDLTHIFISHKKLETISSALCDHWDTL
RNALYERRISELTGKITKSAKEKVQRSLKHEDINLQEIISAAGKELSEAFKQKTSEILSHAHAALDQPLPTTLKKQE
EKEILKSQLDSLLGLYHLLDWFAVDESNEVDPEFSARLTGIKLEMEPSLSFYNKARNYATKKPYSVEKFKLNFQMPT
LASGWDVNKEKNNGAILFVKNGLYYLGIMPKQKGRYKALSFEPTEKTSEGFDKMYYDYFPDAAKMIPKCSTQLKAVT
AHFQTHTTPILLSNNFIEPLEITKEIYDLNNPEKEPKKFQTAYAKKTGDQKGYREALCKWIDFTRDFLSKYTKTTSI
DLSSLRPSSQYKDLGEYYAELNPLLYHISFQRIAEKEIMDAVETGKLYLFQIYNKDFAKGHHGKPNLHTLYWTGLFS
PENLAKTSIKLNGQAELFYRPKSRMKRMAHRLGEKMLNKKLKDQKTPIPDTLYQELYDYVNHRLSHDLSDEARALLP
NVITKEVSHEIIKDRRFTSDKFFFHVPITLNYQAANSPSKFNQRVNAYLKEHPETPIIGIDRGERNLIYITVIDSTG
KILEQRSLNTIQQFDYQKKLDNREKERVAARQAWSVVGTIKDLKQGYLSQVIHEIVDLMIHYQAVVVLENLNFGFKS
KRTGIAEKAVYQQFEKMLIDKLNCLVLKDYPAEKVGGVLNPYQLTDQFTSFAKMGTQSGFLFYVPAPYTSKIDPLTG
FVDPFVWKTIKNHESRKHFLEGFDFLHYDVKTGDFILHFKMNRNLSFQRGLPGFMPAWDIVFEKNETQFDAKGTPFI
AGKRIVPVIENHRFTGRYRDLYPANELIALLEEKGIVFRDGSNILPKLLENDDSHAIDTMVALIRSVLQMRNSNAAT
GEDYINSPVRDLNGVCFDSRFQNPEWPMDADANGAYHIALKGQLLLNHLKESKDLKLQNGISNQDWLAYIQELRN
APAPAPAPAPAPAMVSKGEELFTGVVPILVELDGDVNGHKFSVSGEGEGDATYGKLTLKFICTTGKLPVPWPTLVT
TLTYGVQCFSRYPDHMKQHDFFKSAMPEGYVQERTIFFKDDGNYKTRAEVKFEGDTLVNRIELKGIDFKEDGNILG
HKLEYNYNSHNVYIMADKQKNGIKVNFKIRHNIEDGSVQLADHYQQNTPIGDGPVLLPDNHYLSTQSALSKDPNEK
RDHMVLLEFVTAAGITLGMDELYK
SEQ ID NO: 117
MTQFEGFTNLYQVSKTLRFELIPQGKTLKHIQEQGFIEEDKARNDHYKELKPIIDRIYKTYADQCLQLVQLDWENLS
AAIDSYRKEKTEETRNALIEEQATYRNAIHDYFIGRTDNLTDAINKRHAEIYKGLFKAELFNGKVLKQLGTVTTTEH
ENALLRSFDKFTTYFSGFYENRKNVFSAEDISTAIPHRIVQDNFPKFKENCHIFTRLITAVPSLREHFENVKKAIGI
FVSTSIEEVFSFPFYNQLLTQTQIDLYNQLLGGISREAGTEKIKGLNEVLNLAIQKNDETAHIIASLPHRFIPLFKQ
ILSDRNTLSFILEEFKSDEEVIQSFCKYKTLLRNENVLETAEALFNELNSIDLTHIFISHKKLETISSALCDHWDTL
RNALYERRISELTGKITKSAKEKVQRSLKHEDINLQEIISAAGKELSEAFKQKTSEILSHAHAALDQPLPTTLKKQE
EKEILKSQLDSLLGLYHLLDWFAVDESNEVDPEFSARLTGIKLEMEPSLSFYNKARNYATKKPYSVEKFKLNFQMPT
LASGWDVNKEKNNGAILFVKNGLYYLGIMPKQKGRYKALSFEPTEKTSEGFDKMYYDYFPDAAKMIPKCSTQLKAVT
AHFQTHTTPILLSNNFIEPLEITKEIYDLNNPEKEPKKFQTAYAKKTGDQKGYREALCKWIDFTRDFLSKYTKTTSI
DLSSLRPSSQYKDLGEYYAELNPLLYHISFQRIAEKEIMDAVETGKLYLFQIYNKDFAKGHHGKPNLHTLYWTGLFS
PENLAKTSIKLNGQAELFYRPKSRMKRMAHRLGEKMLNKKLKDQKTPIPDTLYQELYDYVNHRLSHDLSDEARALLP
NVITKEVSHEIIKDRRFTSDKFFFHVPITLNYQAANSPSKFNQRVNAYLKEHPETPIIGIDRGERNLIYITVIDSTG
KILEQRSLNTIQQFDYQKKLDNREKERVAARQAWSVVGTIKDLKQGYLSQVIHEIVDLMIHYQAVVVLENLNFGFKS
KRTGIAEKAVYQQFEKMLIDKLNCLVLKDYPAEKVGGVLNPYQLTDQFTSFAKMGTQSGFLFYVPAPYTSKIDPLTG
FVDPFVWKTIKNHESRKHFLEGFDFLHYDVKTGDFILHFKMNRNLSFQRGLPGFMPAWDIVFEKNETQFDAKGTPFI
AGKRIVPVIENHRFTGRYRDLYPANELIALLEEKGIVFRDGSNILPKLLENDDSHAIDTMVALIRSVLQMRNSNAAT
GEDYINSPVRDLNGVCFDSRFQNPEWPMDADANGAYHIALKGQLLLNHLKESKDLKLQNGISNQDWLAYIQELRN
APAPAPAPAPAPAPA
MVSKGEELFTGVVPILVELDGDVNGHKFSVSGEGEGDATYGKLTLKFICTTGKLPVPWPTLVTT
LTYGVQCFSRYPDHMKQHDFFKSAMPEGYVQERTIFFKDDGNYKTRAEVKFEGDTLVNRIELKGIDFKEDGNILGH
KLEYNYNSHNVYIMADKQKNGIKVNFKIRHNIEDGSVQLADHYQQNTPIGDGPVLLPDNHYLSTQSALSKDPNEKR
DHMVLLEFVTAAGITLGMDELYK
SEQ ID NO: 118
MTQFEGFTNLYQVSKTLRFELIPQGKTLKHIQEQGFIEEDKARNDHYKELKPIIDRIYKTYADQCLQLVQLDWENLS
AAIDSYRKEKTEETRNALIEEQATYRNAIHDYFIGRTDNLTDAINKRHAEIYKGLFKAELFNGKVLKQLGTVTTTEH
ENALLRSFDKFTTYFSGFYENRKNVFSAEDISTAIPHRIVQDNFPKFKENCHIFTRLITAVPSLREHFENVKKAIGI
FVSTSIEEVFSFPFYNQLLTQTQIDLYNQLLGGISREAGTEKIKGLNEVLNLAIQKNDETAHIIASLPHRFIPLFKQ
ILSDRNTLSFILEEFKSDEEVIQSFCKYKTLLRNENVLETAEALFNELNSIDLTHIFISHKKLETISSALCDHWDTL
RNALYERRISELTGKITKSAKEKVQRSLKHEDINLQEIISAAGKELSEAFKQKTSEILSHAHAALDQPLPTTLKKQE
EKEILKSQLDSLLGLYHLLDWFAVDESNEVDPEFSARLTGIKLEMEPSLSFYNKARNYATKKPYSVEKFKLNFQMPT
LASGWDVNKEKNNGAILFVKNGLYYLGIMPKQKGRYKALSFEPTEKTSEGFDKMYYDYFPDAAKMIPKCSTQLKAVT
AHFQTHTTPILLSNNFIEPLEITKEIYDLNNPEKEPKKFQTAYAKKTGDQKGYREALCKWIDFTRDFLSKYTKTTSI
DLSSLRPSSQYKDLGEYYAELNPLLYHISFQRIAEKEIMDAVETGKLYLFQIYNKDFAKGHHGKPNLHTLYWTGLFS
PENLAKTSIKLNGQAELFYRPKSRMKRMAHRLGEKMLNKKLKDQKTPIPDTLYQELYDYVNHRLSHDLSDEARALLP
NVITKEVSHEIIKDRRFTSDKFFFHVPITLNYQAANSPSKFNQRVNAYLKEHPETPIIGIDRGERNLIYITVIDSTG
KILEQRSLNTIQQFDYQKKLDNREKERVAARQAWSVVGTIKDLKQGYLSQVIHEIVDLMIHYQAVVVLENLNFGFKS
KRTGIAEKAVYQQFEKMLIDKLNCLVLKDYPAEKVGGVLNPYQLTDQFTSFAKMGTQSGFLFYVPAPYTSKIDPLTG
FVDPFVWKTIKNHESRKHFLEGFDFLHYDVKTGDFILHFKMNRNLSFQRGLPGFMPAWDIVFEKNETQFDAKGTPFI
AGKRIVPVIENHRFTGRYRDLYPANELIALLEEKGIVFRDGSNILPKLLENDDSHAIDTMVALIRSVLQMRNSNAAT
GEDYINSPVRDLNGVCFDSRFQNPEWPMDADANGAYHIALKGQLLLNHLKESKDLKLQNGISNQDWLAYIQELRN
APAPAPAPAPAPAPAPA
MVSKGEELFTGVVPILVELDGDVNGHKFSVSGEGEGDATYGKLTLKFICTTGKLPVPWPTLVTT
LTYGVQCFSRYPDHMKQHDFFKSAMPEGYVQERTIFFKDDGNYKTRAEVKFEGDTLVNRIELKGIDFKEDGNILGH
KLEYNYNSHNVYIMADKQKNGIKVNFKIRHNIEDGSVQLADHYQQNTPIGDGPVLLPDNHYLSTQSALSKDPNEKR
DHMVLLEFVTAAGITLGMDELYK
SEQ ID NO: 119
MTQFEGFTNLYQVSKTLRFELIPQGKTLKHIQEQGFIEEDKARNDHYKELKPIIDRIYKTYADQCLQLVQLDWENLS
AAIDSYRKEKTEETRNALIEEQATYRNAIHDYFIGRTDNLTDAINKRHAEIYKGLFKAELFNGKVLKQLGTVTTTEH
ENALLRSFDKFTTYFSGFYENRKNVFSAEDISTAIPHRIVQDNFPKFKENCHIFTRLITAVPSLREHFENVKKAIGI
FVSTSIEEVFSFPFYNQLLTQTQIDLYNQLLGGISREAGTEKIKGLNEVLNLAIQKNDETAHIIASLPHRFIPLFKQ
ILSDRNTLSFILEEFKSDEEVIQSFCKYKTLLRNENVLETAEALFNELNSIDLTHIFISHKKLETISSALCDHWDTL
RNALYERRISELTGKITKSAKEKVQRSLKHEDINLQEIISAAGKELSEAFKQKTSEILSHAHAALDQPLPTTLKKQE
EKEILKSQLDSLLGLYHLLDWFAVDESNEVDPEFSARLTGIKLEMEPSLSFYNKARNYATKKPYSVEKFKLNFQMPT
LASGWDVNKEKNNGAILFVKNGLYYLGIMPKQKGRYKALSFEPTEKTSEGFDKMYYDYFPDAAKMIPKCSTQLKAVT
AHFQTHTTPILLSNNFIEPLEITKEIYDLNNPEKEPKKFQTAYAKKTGDQKGYREALCKWIDFTRDFLSKYTKTTSI
DLSSLRPSSQYKDLGEYYAELNPLLYHISFQRIAEKEIMDAVETGKLYLFQIYNKDFAKGHHGKPNLHTLYWTGLFS
PENLAKTSIKLNGQAELFYRPKSRMKRMAHRLGEKMLNKKLKDQKTPIPDTLYQELYDYVNHRLSHDLSDEARALLP
NVITKEVSHEIIKDRRFTSDKFFFHVPITLNYQAANSPSKFNQRVNAYLKEHPETPIIGIDRGERNLIYITVIDSTG
KILEQRSLNTIQQFDYQKKLDNREKERVAARQAWSVVGTIKDLKQGYLSQVIHEIVDLMIHYQAVVVLENLNFGFKS
KRTGIAEKAVYQQFEKMLIDKLNCLVLKDYPAEKVGGVLNPYQLTDQFTSFAKMGTQSGFLFYVPAPYTSKIDPLTG
FVDPFVWKTIKNHESRKHFLEGFDFLHYDVKTGDFILHFKMNRNLSFQRGLPGFMPAWDIVFEKNETQFDAKGTPFI
AGKRIVPVIENHRFTGRYRDLYPANELIALLEEKGIVFRDGSNILPKLLENDDSHAIDTMVALIRSVLQMRNSNAAT
GEDYINSPVRDLNGVCFDSRFQNPEWPMDADANGAYHIALKGQLLLNHLKESKDLKLQNGISNQDWLAYIQELRN
APAPAPAPAPAPAPAPAPA
MVSKGEELFTGVVPILVELDGDVNGHKFSVSGEGEGDATYGKLTLKFICTTGKLPVPWPTLVTT
LTYGVQCFSRYPDHMKQHDFFKSAMPEGYVQERTIFFKDDGNYKTRAEVKFEGDTLVNRIELKGIDFKEDGNILGH
KLEYNYNSHNVYIMADKQKNGIKVNFKIRHNIEDGSVQLADHYQQNTPIGDGPVLLPDNHYLSTQSALSKDPNEKR
DHMVLLEFVTAAGITLGMDELYK
SEQ ID NO: 120
MTQFEGFTNLYQVSKTLRFELIPQGKTLKHIQEQGFIEEDKARNDHYKELKPIIDRIYKTYADQCLQLVQLDWENLS
AAIDSYRKEKTEETRNALIEEQATYRNAIHDYFIGRTDNLTDAINKRHAEIYKGLFKAELFNGKVLKQLGTVTTTEH
ENALLRSFDKFTTYFSGFYENRKNVFSAEDISTAIPHRIVQDNFPKFKENCHIFTRLITAVPSLREHFENVKKAIGI
FVSTSIEEVFSFPFYNQLLTQTQIDLYNQLLGGISREAGTEKIKGLNEVLNLAIQKNDETAHIIASLPHRFIPLFKQ
ILSDRNTLSFILEEFKSDEEVIQSFCKYKTLLRNENVLETAEALFNELNSIDLTHIFISHKKLETISSALCDHWDTL
RNALYERRISELTGKITKSAKEKVQRSLKHEDINLQEIISAAGKELSEAFKQKTSEILSHAHAALDQPLPTTLKKQE
EKEILKSQLDSLLGLYHLLDWFAVDESNEVDPEFSARLTGIKLEMEPSLSFYNKARNYATKKPYSVEKFKLNFQMPT
LASGWDVNKEKNNGAILFVKNGLYYLGIMPKQKGRYKALSFEPTEKTSEGFDKMYYDYFPDAAKMIPKCSTQLKAVT
AHFQTHTTPILLSNNFIEPLEITKEIYDLNNPEKEPKKFQTAYAKKTGDQKGYREALCKWIDFTRDFLSKYTKTTSI
DLSSLRPSSQYKDLGEYYAELNPLLYHISFQRIAEKEIMDAVETGKLYLFQIYNKDFAKGHHGKPNLHTLYWTGLFS
PENLAKTSIKLNGQAELFYRPKSRMKRMAHRLGEKMLNKKLKDQKTPIPDTLYQELYDYVNHRLSHDLSDEARALLP
NVITKEVSHEIIKDRRFTSDKFFFHVPITLNYQAANSPSKFNQRVNAYLKEHPETPIIGIDRGERNLIYITVIDSTG
KILEQRSLNTIQQFDYQKKLDNREKERVAARQAWSVVGTIKDLKQGYLSQVIHEIVDLMIHYQAVVVLENLNFGFKS
KRTGIAEKAVYQQFEKMLIDKLNCLVLKDYPAEKVGGVLNPYQLTDQFTSFAKMGTQSGFLFYVPAPYTSKIDPLTG
FVDPFVWKTIKNHESRKHFLEGFDFLHYDVKTGDFILHFKMNRNLSFQRGLPGFMPAWDIVFEKNETQFDAKGTPFI
AGKRIVPVIENHRFTGRYRDLYPANELIALLEEKGIVFRDGSNILPKLLENDDSHAIDTMVALIRSVLQMRNSNAAT
GEDYINSPVRDLNGVCFDSRFQNPEWPMDADANGAYHIALKGQLLLNHLKESKDLKLQNGISNQDWLAYIQELRN
APAPAPAPAPAPAPAPAPAPA
MVSKGEELFTGVVPILVELDGDVNGHKFSVSGEGEGDATYGKLTLKFICTTGKLPVPWPTLVTT
LTYGVQCFSRYPDHMKQHDFFKSAMPEGYVQERTIFFKDDGNYKTRAEVKFEGDTLVNRIELKGIDFKEDGNILGH
KLEYNYNSHNVYIMADKQKNGIKVNFKIRHNIEDGSVQLADHYQQNTPIGDGPVLLPDNHYLSTQSALSKDPNEKR
DHMVLLEFVTAAGITLGMDELYK
SEQ ID NO: 121
MTQFEGFTNLYQVSKTLRFELIPQGKTLKHIQEQGFIEEDKARNDHYKELKPIIDRIYKTYADQCLQLVQLDWENLS
AAIDSYRKEKTEETRNALIEEQATYRNAIHDYFIGRTDNLTDAINKRHAEIYKGLFKAELFNGKVLKQLGTVTTTEH
ENALLRSFDKFTTYFSGFYENRKNVFSAEDISTAIPHRIVQDNFPKFKENCHIFTRLITAVPSLREHFENVKKAIGI
FVSTSIEEVFSFPFYNQLLTQTQIDLYNQLLGGISREAGTEKIKGLNEVLNLAIQKNDETAHIIASLPHRFIPLFKQ
ILSDRNTLSFILEEFKSDEEVIQSFCKYKTLLRNENVLETAEALFNELNSIDLTHIFISHKKLETISSALCDHWDTL
RNALYERRISELTGKITKSAKEKVQRSLKHEDINLQEIISAAGKELSEAFKQKTSEILSHAHAALDQPLPTTLKKQE
EKEILKSQLDSLLGLYHLLDWFAVDESNEVDPEFSARLTGIKLEMEPSLSFYNKARNYATKKPYSVEKFKLNFQMPT
LASGWDVNKEKNNGAILFVKNGLYYLGIMPKQKGRYKALSFEPTEKTSEGFDKMYYDYFPDAAKMIPKCSTQLKAVT
AHFQTHTTPILLSNNFIEPLEITKEIYDLNNPEKEPKKFQTAYAKKTGDQKGYREALCKWIDFTRDFLSKYTKTTSI
DLSSLRPSSQYKDLGEYYAELNPLLYHISFQRIAEKEIMDAVETGKLYLFQIYNKDFAKGHHGKPNLHTLYWTGLFS
PENLAKTSIKLNGQAELFYRPKSRMKRMAHRLGEKMLNKKLKDQKTPIPDTLYQELYDYVNHRLSHDLSDEARALLP
NVITKEVSHEIIKDRRFTSDKFFFHVPITLNYQAANSPSKFNQRVNAYLKEHPETPIIGIDRGERNLIYITVIDSTG
KILEQRSLNTIQQFDYQKKLDNREKERVAARQAWSVVGTIKDLKQGYLSQVIHEIVDLMIHYQAVVVLENLNFGFKS
KRTGIAEKAVYQQFEKMLIDKLNCLVLKDYPAEKVGGVLNPYQLTDQFTSFAKMGTQSGFLFYVPAPYTSKIDPLTG
FVDPFVWKTIKNHESRKHFLEGFDFLHYDVKTGDFILHFKMNRNLSFQRGLPGFMPAWDIVFEKNETQFDAKGTPFI
AGKRIVPVIENHRFTGRYRDLYPANELIALLEEKGIVFRDGSNILPKLLENDDSHAIDTMVALIRSVLQMRNSNAAT
GEDYINSPVRDLNGVCFDSRFQNPEWPMDADANGAYHIALKGQLLLNHLKESKDLKLQNGISNQDWLAYIQELRN
APAPAPAPAPAPAPAPAPAPAPA
MVSKGEELFTGVVPILVELDGDVNGHKFSVSGEGEGDATYGKLTLKFICTTGKLPVPWPTLVTT
LTYGVQCFSRYPDHMKQHDFFKSAMPEGYVQERTIFFKDDGNYKTRAEVKFEGDTLVNRIELKGIDFKEDGNILGH
KLEYNYNSHNVYIMADKQKNGIKVNFKIRHNIEDGSVQLADHYQQNTPIGDGPVLLPDNHYLSTQSALSKDPNEKR
DHMVLLEFVTAAGITLGMDELYK
SEQ ID NO: 122
MTQFEGFTNLYQVSKTLRFELIPQGKTLKHIQEQGFIEEDKARNDHYKELKPIIDRIYKTYADQCLQLVQLDWENLS
AAIDSYRKEKTEETRNALIEEQATYRNAIHDYFIGRTDNLTDAINKRHAEIYKGLFKAELFNGKVLKQLGTVTTTEH
ENALLRSFDKFTTYFSGFYENRKNVFSAEDISTAIPHRIVQDNFPKFKENCHIFTRLITAVPSLREHFENVKKAIGI
FVSTSIEEVFSFPFYNQLLTQTQIDLYNQLLGGISREAGTEKIKGLNEVLNLAIQKNDETAHIIASLPHRFIPLFKQ
ILSDRNTLSFILEEFKSDEEVIQSFCKYKTLLRNENVLETAEALFNELNSIDLTHIFISHKKLETISSALCDHWDTL
RNALYERRISELTGKITKSAKEKVQRSLKHEDINLQEIISAAGKELSEAFKQKTSEILSHAHAALDQPLPTTLKKQE
EKEILKSQLDSLLGLYHLLDWFAVDESNEVDPEFSARLTGIKLEMEPSLSFYNKARNYATKKPYSVEKFKLNFQMPT
LASGWDVNKEKNNGAILFVKNGLYYLGIMPKQKGRYKALSFEPTEKTSEGFDKMYYDYFPDAAKMIPKCSTQLKAVT
AHFQTHTTPILLSNNFIEPLEITKEIYDLNNPEKEPKKFQTAYAKKTGDQKGYREALCKWIDFTRDFLSKYTKTTSI
DLSSLRPSSQYKDLGEYYAELNPLLYHISFQRIAEKEIMDAVETGKLYLFQIYNKDFAKGHHGKPNLHTLYWTGLFS
PENLAKTSIKLNGQAELFYRPKSRMKRMAHRLGEKMLNKKLKDQKTPIPDTLYQELYDYVNHRLSHDLSDEARALLP
NVITKEVSHEIIKDRRFTSDKFFFHVPITLNYQAANSPSKFNQRVNAYLKEHPETPIIGIDRGERNLIYITVIDSTG
KILEQRSLNTIQQFDYQKKLDNREKERVAARQAWSVVGTIKDLKQGYLSQVIHEIVDLMIHYQAVVVLENLNFGFKS
KRTGIAEKAVYQQFEKMLIDKLNCLVLKDYPAEKVGGVLNPYQLTDQFTSFAKMGTQSGFLFYVPAPYTSKIDPLTG
FVDPFVWKTIKNHESRKHFLEGFDFLHYDVKTGDFILHFKMNRNLSFQRGLPGFMPAWDIVFEKNETQFDAKGTPFI
AGKRIVPVIENHRFTGRYRDLYPANELIALLEEKGIVFRDGSNILPKLLENDDSHAIDTMVALIRSVLQMRNSNAAT
GEDYINSPVRDLNGVCFDSRFQNPEWPMDADANGAYHIALKGQLLLNHLKESKDLKLQNGISNQDWLAYIQELRN
APAPAPAPAPAPAPAPAPAPAPAPA
MVSKGEELFTGVVPILVELDGDVNGHKFSVSGEGEGDATYGKLTLKFICTTGKLPVPWPTLVTT
LTYGVQCFSRYPDHMKQHDFFKSAMPEGYVQERTIFFKDDGNYKTRAEVKFEGDTLVNRIELKGIDFKEDGNILGH
KLEYNYNSHNVYIMADKQKNGIKVNFKIRHNIEDGSVQLADHYQQNTPIGDGPVLLPDNHYLSTQSALSKDPNEKR
DHMVLLEFVTAAGITLGMDELYK
SEQ ID NO: 123
MTQFEGFTNLYQVSKTLRFELIPQGKTLKHIQEQGFIEEDKARNDHYKELKPIIDRIYKTYADQCLQLVQLDWENLS
AAIDSYRKEKTEETRNALIEEQATYRNAIHDYFIGRTDNLTDAINKRHAEIYKGLFKAELFNGKVLKQLGTVTTTEH
ENALLRSFDKFTTYFSGFYENRKNVFSAEDISTAIPHRIVQDNFPKFKENCHIFTRLITAVPSLREHFENVKKAIGI
FVSTSIEEVFSFPFYNQLLTQTQIDLYNQLLGGISREAGTEKIKGLNEVLNLAIQKNDETAHIIASLPHRFIPLFKQ
ILSDRNTLSFILEEFKSDEEVIQSFCKYKTLLRNENVLETAEALFNELNSIDLTHIFISHKKLETISSALCDHWDTL
RNALYERRISELTGKITKSAKEKVQRSLKHEDINLQEIISAAGKELSEAFKQKTSEILSHAHAALDQPLPTTLKKQE
EKEILKSQLDSLLGLYHLLDWFAVDESNEVDPEFSARLTGIKLEMEPSLSFYNKARNYATKKPYSVEKFKLNFQMPT
LASGWDVNKEKNNGAILFVKNGLYYLGIMPKQKGRYKALSFEPTEKTSEGFDKMYYDYFPDAAKMIPKCSTQLKAVT
AHFQTHTTPILLSNNFIEPLEITKEIYDLNNPEKEPKKFQTAYAKKTGDQKGYREALCKWIDFTRDFLSKYTKTTSI
DLSSLRPSSQYKDLGEYYAELNPLLYHISFQRIAEKEIMDAVETGKLYLFQIYNKDFAKGHHGKPNLHTLYWTGLFS
PENLAKTSIKLNGQAELFYRPKSRMKRMAHRLGEKMLNKKLKDQKTPIPDTLYQELYDYVNHRLSHDLSDEARALLP
NVITKEVSHEIIKDRRFTSDKFFFHVPITLNYQAANSPSKFNQRVNAYLKEHPETPIIGIDRGERNLIYITVIDSTG
KILEQRSLNTIQQFDYQKKLDNREKERVAARQAWSVVGTIKDLKQGYLSQVIHEIVDLMIHYQAVVVLENLNFGFKS
KRTGIAEKAVYQQFEKMLIDKLNCLVLKDYPAEKVGGVLNPYQLTDQFTSFAKMGTQSGFLFYVPAPYTSKIDPLTG
FVDPFVWKTIKNHESRKHFLEGFDFLHYDVKTGDFILHFKMNRNLSFQRGLPGFMPAWDIVFEKNETQFDAKGTPFI
AGKRIVPVIENHRFTGRYRDLYPANELIALLEEKGIVFRDGSNILPKLLENDDSHAIDTMVALIRSVLQMRNSNAAT
GEDYINSPVRDLNGVCFDSRFQNPEWPMDADANGAYHIALKGQLLLNHLKESKDLKLQNGISNQDWLAYIQELRN
APAPAPAPAPAPAPAPAPAPAPAPAPA
MVSKGEELFTGVVPILVELDGDVNGHKFSVSGEGEGDATYGKLTLKFICTTGKLPVPWPTLVTT
LTYGVQCFSRYPDHMKQHDFFKSAMPEGYVQERTIFFKDDGNYKTRAEVKFEGDTLVNRIELKGIDFKEDGNILGH
KLEYNYNSHNVYIMADKQKNGIKVNFKIRHNIEDGSVQLADHYQQNTPIGDGPVLLPDNHYLSTQSALSKDPNEKR
DHMVLLEFVTAAGITLGMDELYK
SEQ ID NO: 124
MTQFEGFTNLYQVSKTLRFELIPQGKTLKHIQEQGFIEEDKARNDHYKELKPIIDRIYKTYADQCLQLVQLDWENLS
AAIDSYRKEKTEETRNALIEEQATYRNAIHDYFIGRTDNLTDAINKRHAEIYKGLFKAELFNGKVLKQLGTVTTTEH
ENALLRSFDKETTYFSGFYENRKNVFSAEDISTAIPHRIVQDNFPKFKENCHIFTRLITAVPSLREHFENVKKAIGI
FVSTSIEEVFSFPFYNQLLTQTQIDLYNQLLGGISREAGTEKIKGLNEVLNLAIQKNDETAHIIASLPHRFIPLFKQ
ILSDRNTLSFILEEFKSDEEVIQSFCKYKTLLRNENVLETAEALFNELNSIDLTHIFISHKKLETISSALCDHWDTL
RNALYERRISELTGKITKSAKEKVQRSLKHEDINLQEIISAAGKELSEAFKQKTSEILSHAHAALDQPLPTTLKKQE
EKEILKSQLDSLLGLYHLLDWFAVDESNEVDPEFSARLTGIKLEMEPSLSFYNKARNYATKKPYSVEKFKLNFQMPT
LASGWDVNKEKNNGAILFVKNGLYYLGIMPKQKGRYKALSFEPTEKTSEGFDKMYYDYFPDAAKMIPKCSTQLKAVT
AHFQTHTTPILLSNNFIEPLEITKEIYDLNNPEKEPKKFQTAYAKKTGDQKGYREALCKWIDFTRDFLSKYTKTTSI
DLSSLRPSSQYKDLGEYYAELNPLLYHISFQRIAEKEIMDAVETGKLYLFQIYNKDFAKGHHGKPNLHTLYWTGLFS
PENLAKTSIKLNGQAELFYRPKSRMKRMAHRLGEKMLNKKLKDQKTPIPDTLYQELYDYVNHRLSHDLSDEARALLP
NVITKEVSHEIIKDRRFTSDKFFFHVPITLNYQAANSPSKFNQRVNAYLKEHPETPIIGIDRGERNLIYITVIDSTG
KILEQRSLNTIQQFDYQKKLDNREKERVAARQAWSVVGTIKDLKQGYLSQVIHEIVDLMIHYQAVVVLENLNFGFKS
KRTGIAEKAVYQQFEKMLIDKLNCLVLKDYPAEKVGGVLNPYQLTDQFTSFAKMGTQSGFLFYVPAPYTSKIDPLTG
FVDPFVWKTIKNHESRKHFLEGFDFLHYDVKTGDFILHFKMNRNLSFQRGLPGFMPAWDIVFEKNETQFDAKGTPFI
AGKRIVPVIENHRFTGRYRDLYPANELIALLEEKGIVFRDGSNILPKLLENDDSHAIDTMVALIRSVLQMRNSNAAT
GEDYINSPVRDLNGVCFDSRFQNPEWPMDADANGAYHIALKGQLLLNHLKESKDLKLQNGISNQDWLAYIQELRN
APAPAPAPAPAPAPAPAPAPAPAPAPAPA
MVSKGEELFTGVVPILVELDGDVNGHKFSVSGEGEGDATYGKLTLKFICTTGKLPVPWPTLVTT
LTYGVQCFSRYPDHMKQHDFFKSAMPEGYVQERTIFFKDDGNYKTRAEVKFEGDTLVNRIELKGIDFKEDGNILGH
KLEYNYNSHNVYIMADKQKNGIKVNFKIRHNIEDGSVQLADHYQQNTPIGDGPVLLPDNHYLSTQSALSKDPNEKR
DHMVLLEFVTAAGITLGMDELYK
SEQ ID NO: 125
MTQFEGFTNLYQVSKTLRFELIPQGKTLKHIQEQGFIEEDKARNDHYKELKPIIDRIYKTYADQCLQLVQLDWENLS
AAIDSYRKEKTEETRNALIEEQATYRNAIHDYFIGRTDNLTDAINKRHAEIYKGLFKAELFNGKVLKQLGTVTTTEH
ENALLRSFDKETTYFSGFYENRKNVFSAEDISTAIPHRIVQDNFPKFKENCHIFTRLITAVPSLREHFENVKKAIGI
FVSTSIEEVFSFPFYNQLLTQTQIDLYNQLLGGISREAGTEKIKGLNEVLNLAIQKNDETAHIIASLPHRFIPLFKQ
ILSDRNTLSFILEEFKSDEEVIQSFCKYKTLLRNENVLETAEALFNELNSIDLTHIFISHKKLETISSALCDHWDTL
RNALYERRISELTGKITKSAKEKVQRSLKHEDINLQEIISAAGKELSEAFKQKTSEILSHAHAALDQPLPTTLKKQE
EKEILKSQLDSLLGLYHLLDWFAVDESNEVDPEFSARLTGIKLEMEPSLSFYNKARNYATKKPYSVEKFKLNFQMPT
LASGWDVNKEKNNGAILFVKNGLYYLGIMPKQKGRYKALSFEPTEKTSEGFDKMYYDYFPDAAKMIPKCSTQLKAVT
AHFQTHTTPILLSNNFIEPLEITKEIYDLNNPEKEPKKFQTAYAKKTGDQKGYREALCKWIDFTRDFLSKYTKTTSI
DLSSLRPSSQYKDLGEYYAELNPLLYHISFQRIAEKEIMDAVETGKLYLFQIYNKDFAKGHHGKPNLHTLYWTGLFS
PENLAKTSIKLNGQAELFYRPKSRMKRMAHRLGEKMLNKKLKDQKTPIPDTLYQELYDYVNHRLSHDLSDEARALLP
NVITKEVSHEIIKDRRFTSDKFFFHVPITLNYQAANSPSKFNQRVNAYLKEHPETPIIGIDRGERNLIYITVIDSTG
KILEQRSLNTIQQFDYQKKLDNREKERVAARQAWSVVGTIKDLKQGYLSQVIHEIVDLMIHYQAVVVLENLNFGFKS
KRTGIAEKAVYQQFEKMLIDKLNCLVLKDYPAEKVGGVLNPYQLTDQFTSFAKMGTQSGFLFYVPAPYTSKIDPLTG
FVDPFVWKTIKNHESRKHFLEGFDFLHYDVKTGDFILHFKMNRNLSFQRGLPGFMPAWDIVFEKNETQFDAKGTPFI
AGKRIVPVIENHRFTGRYRDLYPANELIALLEEKGIVFRDGSNILPKLLENDDSHAIDTMVALIRSVLQMRNSNAAT
GEDYINSPVRDLNGVCFDSRFQNPEWPMDADANGAYHIALKGQLLLNHLKESKDLKLQNGISNQDWLAYIQELRN
XPMVSKGEELFTGVVPILVELDGDVNGHKFSVSGEGEGDATYGKLTLKFICTTGKLPVPWPTLVTT
LTYGVQCFSRYPDHMKQHDFFKSAMPEGYVQERTIFFKDDGNYKTRAEVKFEGDTLVNRIELKGIDFKEDGNILGH
KLEYNYNSHNVYIMADKQKNGIKVNFKIRHNIEDGSVQLADHYQQNTPIGDGPVLLPDNHYLSTQSALSKDPNEKR
DHMVLLEFVTAAGITLGMDELYK
SEQ ID NO: 126
MTQFEGFTNLYQVSKTLRFELIPQGKTLKHIQEQGFIEEDKARNDHYKELKPIIDRIYKTYADQCLQLVQLDWENLS
AAIDSYRKEKTEETRNALIEEQATYRNAIHDYFIGRTDNLTDAINKRHAEIYKGLFKAELFNGKVLKQLGTVTTTEH
ENALLRSFDKETTYFSGFYENRKNVFSAEDISTAIPHRIVQDNFPKFKENCHIFTRLITAVPSLREHFENVKKAIGI
FVSTSIEEVFSFPFYNQLLTQTQIDLYNQLLGGISREAGTEKIKGLNEVLNLAIQKNDETAHIIASLPHRFIPLFKQ
ILSDRNTLSFILEEFKSDEEVIQSFCKYKTLLRNENVLETAEALFNELNSIDLTHIFISHKKLETISSALCDHWDTL
RNALYERRISELTGKITKSAKEKVQRSLKHEDINLQEIISAAGKELSEAFKQKTSEILSHAHAALDQPLPTTLKKQE
EKEILKSQLDSLLGLYHLLDWFAVDESNEVDPEFSARLTGIKLEMEPSLSFYNKARNYATKKPYSVEKFKLNFQMPT
LASGWDVNKEKNNGAILFVKNGLYYLGIMPKQKGRYKALSFEPTEKTSEGFDKMYYDYFPDAAKMIPKCSTQLKAVT
AHFQTHTTPILLSNNFIEPLEITKEIYDLNNPEKEPKKFQTAYAKKTGDQKGYREALCKWIDFTRDFLSKYTKTTSI
DLSSLRPSSQYKDLGEYYAELNPLLYHISFQRIAEKEIMDAVETGKLYLFQIYNKDFAKGHHGKPNLHTLYWTGLFS
PENLAKTSIKLNGQAELFYRPKSRMKRMAHRLGEKMLNKKLKDQKTPIPDTLYQELYDYVNHRLSHDLSDEARALLP
NVITKEVSHEIIKDRRFTSDKFFFHVPITLNYQAANSPSKFNQRVNAYLKEHPETPIIGIDRGERNLIYITVIDSTG
KILEQRSLNTIQQFDYQKKLDNREKERVAARQAWSVVGTIKDLKQGYLSQVIHEIVDLMIHYQAVVVLENLNFGFKS
KRTGIAEKAVYQQFEKMLIDKLNCLVLKDYPAEKVGGVLNPYQLTDQFTSFAKMGTQSGFLFYVPAPYTSKIDPLTG
FVDPFVWKTIKNHESRKHFLEGFDFLHYDVKTGDFILHFKMNRNLSFQRGLPGFMPAWDIVFEKNETQFDAKGTPFI
AGKRIVPVIENHRFTGRYRDLYPANELIALLEEKGIVFRDGSNILPKLLENDDSHAIDTMVALIRSVLQMRNSNAAT
GEDYINSPVRDLNGVCFDSRFQNPEWPMDADANGAYHIALKGQLLLNHLKESKDLKLQNGISNQDWLAYIQELRN
XPXPMVSKGEELFTGVVPILVELDGDVNGHKFSVSGEGEGDATYGKLTLKFICTTGKLPVPWPTLVTT
LTYGVQCFSRYPDHMKQHDFFKSAMPEGYVQERTIFFKDDGNYKTRAEVKFEGDTLVNRIELKGIDFKEDGNILGH
KLEYNYNSHNVYIMADKQKNGIKVNFKIRHNIEDGSVQLADHYQQNTPIGDGPVLLPDNHYLSTQSALSKDPNEKR
DHMVLLEFVTAAGITLGMDELYK
SEQ ID NO: 127
MTQFEGFTNLYQVSKTLRFELIPQGKTLKHIQEQGFIEEDKARNDHYKELKPIIDRIYKTYADQCLQLVQLDWENLS
AAIDSYRKEKTEETRNALIEEQATYRNAIHDYFIGRTDNLTDAINKRHAEIYKGLFKAELFNGKVLKQLGTVTTTEH
ENALLRSFDKETTYFSGFYENRKNVFSAEDISTAIPHRIVQDNFPKFKENCHIFTRLITAVPSLREHFENVKKAIGI
FVSTSIEEVFSFPFYNQLLTQTQIDLYNQLLGGISREAGTEKIKGLNEVLNLAIQKNDETAHIIASLPHRFIPLFKQ
ILSDRNTLSFILEEFKSDEEVIQSFCKYKTLLRNENVLETAEALFNELNSIDLTHIFISHKKLETISSALCDHWDTL
RNALYERRISELTGKITKSAKEKVQRSLKHEDINLQEIISAAGKELSEAFKQKTSEILSHAHAALDQPLPTTLKKQE
EKEILKSQLDSLLGLYHLLDWFAVDESNEVDPEFSARLTGIKLEMEPSLSFYNKARNYATKKPYSVEKFKLNFQMPT
LASGWDVNKEKNNGAILFVKNGLYYLGIMPKQKGRYKALSFEPTEKTSEGFDKMYYDYFPDAAKMIPKCSTQLKAVT
AHFQTHTTPILLSNNFIEPLEITKEIYDLNNPEKEPKKFQTAYAKKTGDQKGYREALCKWIDFTRDFLSKYTKTTSI
DLSSLRPSSQYKDLGEYYAELNPLLYHISFQRIAEKEIMDAVETGKLYLFQIYNKDFAKGHHGKPNLHTLYWTGLFS
PENLAKTSIKLNGQAELFYRPKSRMKRMAHRLGEKMLNKKLKDQKTPIPDTLYQELYDYVNHRLSHDLSDEARALLP
NVITKEVSHEIIKDRRFTSDKFFFHVPITLNYQAANSPSKFNQRVNAYLKEHPETPIIGIDRGERNLIYITVIDSTG
KILEQRSLNTIQQFDYQKKLDNREKERVAARQAWSVVGTIKDLKQGYLSQVIHEIVDLMIHYQAVVVLENLNFGFKS
KRTGIAEKAVYQQFEKMLIDKLNCLVLKDYPAEKVGGVLNPYQLTDQFTSFAKMGTQSGFLFYVPAPYTSKIDPLTG
FVDPFVWKTIKNHESRKHFLEGFDFLHYDVKTGDFILHFKMNRNLSFQRGLPGFMPAWDIVFEKNETQFDAKGTPFI
AGKRIVPVIENHRFTGRYRDLYPANELIALLEEKGIVFRDGSNILPKLLENDDSHAIDTMVALIRSVLQMRNSNAAT
GEDYINSPVRDLNGVCFDSRFQNPEWPMDADANGAYHIALKGQLLLNHLKESKDLKLQNGISNQDWLAYIQELRN
XPXPXPMVSKGEELFTGVVPILVELDGDVNGHKFSVSGEGEGDATYGKLTLKFICTTGKLPVPWPTLVTT
LTYGVQCFSRYPDHMKQHDFFKSAMPEGYVQERTIFFKDDGNYKTRAEVKFEGDTLVNRIELKGIDFKEDGNILGH
KLEYNYNSHNVYIMADKQKNGIKVNFKIRHNIEDGSVQLADHYQQNTPIGDGPVLLPDNHYLSTQSALSKDPNEKR
DHMVLLEFVTAAGITLGMDELYK
SEQ ID NO: 128
MTQFEGFTNLYQVSKTLRFELIPQGKTLKHIQEQGFIEEDKARNDHYKELKPIIDRIYKTYADQCLQLVQLDWENLS
AAIDSYRKEKTEETRNALIEEQATYRNAIHDYFIGRTDNLTDAINKRHAEIYKGLFKAELFNGKVLKQLGTVTTTEH
ENALLRSFDKFTTYFSGFYENRKNVFSAEDISTAIPHRIVQDNFPKFKENCHIFTRLITAVPSLREHFENVKKAIGI
FVSTSIEEVFSFPFYNQLLTQTQIDLYNQLLGGISREAGTEKIKGLNEVLNLAIQKNDETAHIIASLPHRFIPLFKQ
ILSDRNTLSFILEEFKSDEEVIQSFCKYKTLLRNENVLETAEALFNELNSIDLTHIFISHKKLETISSALCDHWDTL
RNALYERRISELTGKITKSAKEKVQRSLKHEDINLQEIISAAGKELSEAFKQKTSEILSHAHAALDQPLPTTLKKQE
EKEILKSQLDSLLGLYHLLDWFAVDESNEVDPEFSARLTGIKLEMEPSLSFYNKARNYATKKPYSVEKFKLNFQMPT
LASGWDVNKEKNNGAILFVKNGLYYLGIMPKQKGRYKALSFEPTEKTSEGFDKMYYDYFPDAAKMIPKCSTQLKAVT
AHFQTHTTPILLSNNFIEPLEITKEIYDLNNPEKEPKKFQTAYAKKTGDQKGYREALCKWIDFTRDFLSKYTKTTSI
DLSSLRPSSQYKDLGEYYAELNPLLYHISFQRIAEKEIMDAVETGKLYLFQIYNKDFAKGHHGKPNLHTLYWTGLFS
PENLAKTSIKLNGQAELFYRPKSRMKRMAHRLGEKMLNKKLKDQKTPIPDTLYQELYDYVNHRLSHDLSDEARALLP
NVITKEVSHEIIKDRRFTSDKFFFHVPITLNYQAANSPSKFNQRVNAYLKEHPETPIIGIDRGERNLIYITVIDSTG
KILEQRSLNTIQQFDYQKKLDNREKERVAARQAWSVVGTIKDLKQGYLSQVIHEIVDLMIHYQAVVVLENLNFGFKS
KRTGIAEKAVYQQFEKMLIDKLNCLVLKDYPAEKVGGVLNPYQLTDQFTSFAKMGTQSGFLFYVPAPYTSKIDPLTG
FVDPFVWKTIKNHESRKHFLEGFDFLHYDVKTGDFILHFKMNRNLSFQRGLPGFMPAWDIVFEKNETQFDAKGTPFI
AGKRIVPVIENHRFTGRYRDLYPANELIALLEEKGIVFRDGSNILPKLLENDDSHAIDTMVALIRSVLQMRNSNAAT
GEDYINSPVRDLNGVCFDSRFQNPEWPMDADANGAYHIALKGQLLLNHLKESKDLKLQNGISNQDWLAYIQELRN
XPXPXPXPMVSKGEELFTGVVPILVELDGDVNGHKFSVSGEGEGDATYGKLTLKFICTTGKLPVPWPTLVTT
LTYGVQCFSRYPDHMKQHDFFKSAMPEGYVQERTIFFKDDGNYKTRAEVKFEGDTLVNRIELKGIDFKEDGNILGH
KLEYNYNSHNVYIMADKQKNGIKVNFKIRHNIEDGSVQLADHYQQNTPIGDGPVLLPDNHYLSTQSALSKDPNEKR
DHMVLLEFVTAAGITLGMDELYK
SEQ ID NO: 129
MTQFEGFTNLYQVSKTLRFELIPQGKTLKHIQEQGFIEEDKARNDHYKELKPIIDRIYKTYADQCLQLVQLDWENLS
AAIDSYRKEKTEETRNALIEEQATYRNAIHDYFIGRTDNLTDAINKRHAEIYKGLFKAELFNGKVLKQLGTVTTTEH
ENALLRSFDKFTTYFSGFYENRKNVFSAEDISTAIPHRIVQDNFPKFKENCHIFTRLITAVPSLREHFENVKKAIGI
FVSTSIEEVFSFPFYNQLLTQTQIDLYNQLLGGISREAGTEKIKGLNEVLNLAIQKNDETAHIIASLPHRFIPLFKQ
ILSDRNTLSFILEEFKSDEEVIQSFCKYKTLLRNENVLETAEALFNELNSIDLTHIFISHKKLETISSALCDHWDTL
RNALYERRISELTGKITKSAKEKVQRSLKHEDINLQEIISAAGKELSEAFKQKTSEILSHAHAALDQPLPTTLKKQE
EKEILKSQLDSLLGLYHLLDWFAVDESNEVDPEFSARLTGIKLEMEPSLSFYNKARNYATKKPYSVEKFKLNFQMPT
LASGWDVNKEKNNGAILFVKNGLYYLGIMPKQKGRYKALSFEPTEKTSEGFDKMYYDYFPDAAKMIPKCSTQLKAVT
AHFQTHTTPILLSNNFIEPLEITKEIYDLNNPEKEPKKFQTAYAKKTGDQKGYREALCKWIDFTRDFLSKYTKTTSI
DLSSLRPSSQYKDLGEYYAELNPLLYHISFQRIAEKEIMDAVETGKLYLFQIYNKDFAKGHHGKPNLHTLYWTGLFS
PENLAKTSIKLNGQAELFYRPKSRMKRMAHRLGEKMLNKKLKDQKTPIPDTLYQELYDYVNHRLSHDLSDEARALLP
NVITKEVSHEIIKDRRFTSDKFFFHVPITLNYQAANSPSKFNQRVNAYLKEHPETPIIGIDRGERNLIYITVIDSTG
KILEQRSLNTIQQFDYQKKLDNREKERVAARQAWSVVGTIKDLKQGYLSQVIHEIVDLMIHYQAVVVLENLNFGFKS
KRTGIAEKAVYQQFEKMLIDKLNCLVLKDYPAEKVGGVLNPYQLTDQFTSFAKMGTQSGFLFYVPAPYTSKIDPLTG
FVDPFVWKTIKNHESRKHFLEGFDFLHYDVKTGDFILHFKMNRNLSFQRGLPGFMPAWDIVFEKNETQFDAKGTPFI
AGKRIVPVIENHRFTGRYRDLYPANELIALLEEKGIVFRDGSNILPKLLENDDSHAIDTMVALIRSVLQMRNSNAAT
GEDYINSPVRDLNGVCFDSRFQNPEWPMDADANGAYHIALKGQLLLNHLKESKDLKLQNGISNQDWLAYIQELRN
XPXPXPXPXPMVSKGEELFTGVVPILVELDGDVNGHKFSVSGEGEGDATYGKLTLKFICTTGKLPVPWPTLVTT
LTYGVQCFSRYPDHMKQHDFFKSAMPEGYVQERTIFFKDDGNYKTRAEVKFEGDTLVNRIELKGIDFKEDGNILGH
KLEYNYNSHNVYIMADKQKNGIKVNFKIRHNIEDGSVQLADHYQQNTPIGDGPVLLPDNHYLSTQSALSKDPNEKR
DHMVLLEFVTAAGITLGMDELYK
SEQ ID NO: 130
MTQFEGFTNLYQVSKTLRFELIPQGKTLKHIQEQGFIEEDKARNDHYKELKPIIDRIYKTYADQCLQLVQLDWENLS
AAIDSYRKEKTEETRNALIEEQATYRNAIHDYFIGRTDNLTDAINKRHAEIYKGLFKAELFNGKVLKQLGTVTTTEH
ENALLRSFDKFTTYFSGFYENRKNVFSAEDISTAIPHRIVQDNFPKFKENCHIFTRLITAVPSLREHFENVKKAIGI
FVSTSIEEVFSFPFYNQLLTQTQIDLYNQLLGGISREAGTEKIKGLNEVLNLAIQKNDETAHIIASLPHRFIPLFKQ
ILSDRNTLSFILEEFKSDEEVIQSFCKYKTLLRNENVLETAEALFNELNSIDLTHIFISHKKLETISSALCDHWDTL
RNALYERRISELTGKITKSAKEKVQRSLKHEDINLQEIISAAGKELSEAFKQKTSEILSHAHAALDQPLPTTLKKQE
EKEILKSQLDSLLGLYHLLDWFAVDESNEVDPEFSARLTGIKLEMEPSLSFYNKARNYATKKPYSVEKFKLNFQMPT
LASGWDVNKEKNNGAILFVKNGLYYLGIMPKQKGRYKALSFEPTEKTSEGFDKMYYDYFPDAAKMIPKCSTQLKAVT
AHFQTHTTPILLSNNFIEPLEITKEIYDLNNPEKEPKKFQTAYAKKTGDQKGYREALCKWIDFTRDFLSKYTKTTSI
DLSSLRPSSQYKDLGEYYAELNPLLYHISFQRIAEKEIMDAVETGKLYLFQIYNKDFAKGHHGKPNLHTLYWTGLFS
PENLAKTSIKLNGQAELFYRPKSRMKRMAHRLGEKMLNKKLKDQKTPIPDTLYQELYDYVNHRLSHDLSDEARALLP
NVITKEVSHEIIKDRRFTSDKFFFHVPITLNYQAANSPSKFNQRVNAYLKEHPETPIIGIDRGERNLIYITVIDSTG
KILEQRSLNTIQQFDYQKKLDNREKERVAARQAWSVVGTIKDLKQGYLSQVIHEIVDLMIHYQAVVVLENLNFGFKS
KRTGIAEKAVYQQFEKMLIDKLNCLVLKDYPAEKVGGVLNPYQLTDQFTSFAKMGTQSGFLFYVPAPYTSKIDPLTG
FVDPFVWKTIKNHESRKHFLEGFDFLHYDVKTGDFILHFKMNRNLSFQRGLPGFMPAWDIVFEKNETQFDAKGTPFI
AGKRIVPVIENHRFTGRYRDLYPANELIALLEEKGIVFRDGSNILPKLLENDDSHAIDTMVALIRSVLQMRNSNAAT
GEDYINSPVRDLNGVCFDSRFQNPEWPMDADANGAYHIALKGQLLLNHLKESKDLKLQNGISNQDWLAYIQELRN
XPXPXPXPXPXP
MVSKGEELFTGVVPILVELDGDVNGHKFSVSGEGEGDATYGKLTLKFICTTGKLPVPWPTLVTT
LTYGVQCFSRYPDHMKQHDFFKSAMPEGYVQERTIFFKDDGNYKTRAEVKFEGDTLVNRIELKGIDFKEDGNILGH
KLEYNYNSHNVYIMADKQKNGIKVNFKIRHNIEDGSVQLADHYQQNTPIGDGPVLLPDNHYLSTQSALSKDPNEKR
DHMVLLEFVTAAGITLGMDELYK
SEQ ID NO: 131
MTQFEGFTNLYQVSKTLRFELIPQGKTLKHIQEQGFIEEDKARNDHYKELKPIIDRIYKTYADQCLQLVQLDWENLS
AAIDSYRKEKTEETRNALIEEQATYRNAIHDYFIGRTDNLTDAINKRHAEIYKGLFKAELFNGKVLKQLGTVTTTEH
ENALLRSFDKFTTYFSGFYENRKNVFSAEDISTAIPHRIVQDNFPKFKENCHIFTRLITAVPSLREHFENVKKAIGI
FVSTSIEEVFSFPFYNQLLTQTQIDLYNQLLGGISREAGTEKIKGLNEVLNLAIQKNDETAHIIASLPHRFIPLFKQ
ILSDRNTLSFILEEFKSDEEVIQSFCKYKTLLRNENVLETAEALFNELNSIDLTHIFISHKKLETISSALCDHWDTL
RNALYERRISELTGKITKSAKEKVQRSLKHEDINLQEIISAAGKELSEAFKQKTSEILSHAHAALDQPLPTTLKKQE
EKEILKSQLDSLLGLYHLLDWFAVDESNEVDPEFSARLTGIKLEMEPSLSFYNKARNYATKKPYSVEKFKLNFQMPT
LASGWDVNKEKNNGAILFVKNGLYYLGIMPKQKGRYKALSFEPTEKTSEGFDKMYYDYFPDAAKMIPKCSTQLKAVT
AHFQTHTTPILLSNNFIEPLEITKEIYDLNNPEKEPKKFQTAYAKKTGDQKGYREALCKWIDFTRDFLSKYTKTTSI
DLSSLRPSSQYKDLGEYYAELNPLLYHISFQRIAEKEIMDAVETGKLYLFQIYNKDFAKGHHGKPNLHTLYWTGLFS
PENLAKTSIKLNGQAELFYRPKSRMKRMAHRLGEKMLNKKLKDQKTPIPDTLYQELYDYVNHRLSHDLSDEARALLP
NVITKEVSHEIIKDRRFTSDKFFFHVPITLNYQAANSPSKFNQRVNAYLKEHPETPIIGIDRGERNLIYITVIDSTG
KILEQRSLNTIQQFDYQKKLDNREKERVAARQAWSVVGTIKDLKQGYLSQVIHEIVDLMIHYQAVVVLENLNFGFKS
KRTGIAEKAVYQQFEKMLIDKLNCLVLKDYPAEKVGGVLNPYQLTDQFTSFAKMGTQSGFLFYVPAPYTSKIDPLTG
FVDPFVWKTIKNHESRKHFLEGFDFLHYDVKTGDFILHFKMNRNLSFQRGLPGFMPAWDIVFEKNETQFDAKGTPFI
AGKRIVPVIENHRFTGRYRDLYPANELIALLEEKGIVFRDGSNILPKLLENDDSHAIDTMVALIRSVLQMRNSNAAT
GEDYINSPVRDLNGVCFDSRFQNPEWPMDADANGAYHIALKGQLLLNHLKESKDLKLQNGISNQDWLAYIQELRN
XPXPXPXPXPXPXP
MVSKGEELFTGVVPILVELDGDVNGHKFSVSGEGEGDATYGKLTLKFICTTGKLPVPWPTLVTT
LTYGVQCFSRYPDHMKQHDFFKSAMPEGYVQERTIFFKDDGNYKTRAEVKFEGDTLVNRIELKGIDFKEDGNILGH
KLEYNYNSHNVYIMADKQKNGIKVNFKIRHNIEDGSVQLADHYQQNTPIGDGPVLLPDNHYLSTQSALSKDPNEKR
DHMVLLEFVTAAGITLGMDELYK
SEQ ID NO: 132
MTQFEGFTNLYQVSKTLRFELIPQGKTLKHIQEQGFIEEDKARNDHYKELKPIIDRIYKTYADQCLQLVQLDWENLS
AAIDSYRKEKTEETRNALIEEQATYRNAIHDYFIGRTDNLTDAINKRHAEIYKGLFKAELFNGKVLKQLGTVTTTEH
ENALLRSFDKFTTYFSGFYENRKNVFSAEDISTAIPHRIVQDNFPKFKENCHIFTRLITAVPSLREHFENVKKAIGI
FVSTSIEEVFSFPFYNQLLTQTQIDLYNQLLGGISREAGTEKIKGLNEVLNLAIQKNDETAHIIASLPHRFIPLFKQ
ILSDRNTLSFILEEFKSDEEVIQSFCKYKTLLRNENVLETAEALFNELNSIDLTHIFISHKKLETISSALCDHWDTL
RNALYERRISELTGKITKSAKEKVQRSLKHEDINLQEIISAAGKELSEAFKQKTSEILSHAHAALDQPLPTTLKKQE
EKEILKSQLDSLLGLYHLLDWFAVDESNEVDPEFSARLTGIKLEMEPSLSFYNKARNYATKKPYSVEKFKLNFQMPT
LASGWDVNKEKNNGAILFVKNGLYYLGIMPKQKGRYKALSFEPTEKTSEGFDKMYYDYFPDAAKMIPKCSTQLKAVT
AHFQTHTTPILLSNNFIEPLEITKEIYDLNNPEKEPKKFQTAYAKKTGDQKGYREALCKWIDFTRDFLSKYTKTTSI
DLSSLRPSSQYKDLGEYYAELNPLLYHISFQRIAEKEIMDAVETGKLYLFQIYNKDFAKGHHGKPNLHTLYWTGLFS
PENLAKTSIKLNGQAELFYRPKSRMKRMAHRLGEKMLNKKLKDQKTPIPDTLYQELYDYVNHRLSHDLSDEARALLP
NVITKEVSHEIIKDRRFTSDKFFFHVPITLNYQAANSPSKFNQRVNAYLKEHPETPIIGIDRGERNLIYITVIDSTG
KILEQRSLNTIQQFDYQKKLDNREKERVAARQAWSVVGTIKDLKQGYLSQVIHEIVDLMIHYQAVVVLENLNFGFKS
KRTGIAEKAVYQQFEKMLIDKLNCLVLKDYPAEKVGGVLNPYQLTDQFTSFAKMGTQSGFLFYVPAPYTSKIDPLTG
FVDPFVWKTIKNHESRKHFLEGFDFLHYDVKTGDFILHFKMNRNLSFQRGLPGFMPAWDIVFEKNETQFDAKGTPFI
AGKRIVPVIENHRFTGRYRDLYPANELIALLEEKGIVFRDGSNILPKLLENDDSHAIDTMVALIRSVLQMRNSNAAT
GEDYINSPVRDLNGVCFDSRFQNPEWPMDADANGAYHIALKGQLLLNHLKESKDLKLQNGISNQDWLAYIQELRN
XPXPXPXPXPXPXPXP
MVSKGEELFTGVVPILVELDGDVNGHKFSVSGEGEGDATYGKLTLKFICTTGKLPVPWPTLVTT
LTYGVQCFSRYPDHMKQHDFFKSAMPEGYVQERTIFFKDDGNYKTRAEVKFEGDTLVNRIELKGIDFKEDGNILGH
KLEYNYNSHNVYIMADKQKNGIKVNFKIRHNIEDGSVQLADHYQQNTPIGDGPVLLPDNHYLSTQSALSKDPNEKR
DHMVLLEFVTAAGITLGMDELYK
SEQ ID NO: 133
MTQFEGFTNLYQVSKTLRFELIPQGKTLKHIQEQGFIEEDKARNDHYKELKPIIDRIYKTYADQCLQLVQLDWENLS
AAIDSYRKEKTEETRNALIEEQATYRNAIHDYFIGRTDNLTDAINKRHAEIYKGLFKAELFNGKVLKQLGTVTTTEH
ENALLRSFDKFTTYFSGFYENRKNVFSAEDISTAIPHRIVQDNFPKFKENCHIFTRLITAVPSLREHFENVKKAIGI
FVSTSIEEVFSFPFYNQLLTQTQIDLYNQLLGGISREAGTEKIKGLNEVLNLAIQKNDETAHIIASLPHRFIPLFKQ
ILSDRNTLSFILEEFKSDEEVIQSFCKYKTLLRNENVLETAEALFNELNSIDLTHIFISHKKLETISSALCDHWDTL
RNALYERRISELTGKITKSAKEKVQRSLKHEDINLQEIISAAGKELSEAFKQKTSEILSHAHAALDQPLPTTLKKQE
EKEILKSQLDSLLGLYHLLDWFAVDESNEVDPEFSARLTGIKLEMEPSLSFYNKARNYATKKPYSVEKFKLNFQMPT
LASGWDVNKEKNNGAILFVKNGLYYLGIMPKQKGRYKALSFEPTEKTSEGFDKMYYDYFPDAAKMIPKCSTQLKAVT
AHFQTHTTPILLSNNFIEPLEITKEIYDLNNPEKEPKKFQTAYAKKTGDQKGYREALCKWIDFTRDFLSKYTKTTSI
DLSSLRPSSQYKDLGEYYAELNPLLYHISFQRIAEKEIMDAVETGKLYLFQIYNKDFAKGHHGKPNLHTLYWTGLFS
PENLAKTSIKLNGQAELFYRPKSRMKRMAHRLGEKMLNKKLKDQKTPIPDTLYQELYDYVNHRLSHDLSDEARALLP
NVITKEVSHEIIKDRRFTSDKFFFHVPITLNYQAANSPSKFNQRVNAYLKEHPETPIIGIDRGERNLIYITVIDSTG
KILEQRSLNTIQQFDYQKKLDNREKERVAARQAWSVVGTIKDLKQGYLSQVIHEIVDLMIHYQAVVVLENLNFGFKS
KRTGIAEKAVYQQFEKMLIDKLNCLVLKDYPAEKVGGVLNPYQLTDQFTSFAKMGTQSGFLFYVPAPYTSKIDPLTG
FVDPFVWKTIKNHESRKHFLEGFDFLHYDVKTGDFILHFKMNRNLSFQRGLPGFMPAWDIVFEKNETQFDAKGTPFI
AGKRIVPVIENHRFTGRYRDLYPANELIALLEEKGIVFRDGSNILPKLLENDDSHAIDTMVALIRSVLQMRNSNAAT
GEDYINSPVRDLNGVCFDSRFQNPEWPMDADANGAYHIALKGQLLLNHLKESKDLKLQNGISNQDWLAYIQELRN
XPXPXPXPXPXPXPXPXP
MVSKGEELFTGVVPILVELDGDVNGHKFSVSGEGEGDATYGKLTLKFICTTGKLPVPWPTLVTT
LTYGVQCFSRYPDHMKQHDFFKSAMPEGYVQERTIFFKDDGNYKTRAEVKFEGDTLVNRIELKGIDFKEDGNILGH
KLEYNYNSHNVYIMADKQKNGIKVNFKIRHNIEDGSVQLADHYQQNTPIGDGPVLLPDNHYLSTQSALSKDPNEKR
DHMVLLEFVTAAGITLGMDELYK
SEQ ID NO: 134
MTQFEGFTNLYQVSKTLRFELIPQGKTLKHIQEQGFIEEDKARNDHYKELKPIIDRIYKTYADQCLQLVQLDWENLS
AAIDSYRKEKTEETRNALIEEQATYRNAIHDYFIGRTDNLTDAINKRHAEIYKGLFKAELFNGKVLKQLGTVTTTEH
ENALLRSFDKFTTYFSGFYENRKNVFSAEDISTAIPHRIVQDNFPKFKENCHIFTRLITAVPSLREHFENVKKAIGI
FVSTSIEEVFSFPFYNQLLTQTQIDLYNQLLGGISREAGTEKIKGLNEVLNLAIQKNDETAHIIASLPHRFIPLFKQ
ILSDRNTLSFILEEFKSDEEVIQSFCKYKTLLRNENVLETAEALFNELNSIDLTHIFISHKKLETISSALCDHWDTL
RNALYERRISELTGKITKSAKEKVQRSLKHEDINLQEIISAAGKELSEAFKQKTSEILSHAHAALDQPLPTTLKKQE
EKEILKSQLDSLLGLYHLLDWFAVDESNEVDPEFSARLTGIKLEMEPSLSFYNKARNYATKKPYSVEKFKLNFQMPT
LASGWDVNKEKNNGAILFVKNGLYYLGIMPKQKGRYKALSFEPTEKTSEGFDKMYYDYFPDAAKMIPKCSTQLKAVT
AHFQTHTTPILLSNNFIEPLEITKEIYDLNNPEKEPKKFQTAYAKKTGDQKGYREALCKWIDFTRDFLSKYTKTTSI
DLSSLRPSSQYKDLGEYYAELNPLLYHISFQRIAEKEIMDAVETGKLYLFQIYNKDFAKGHHGKPNLHTLYWTGLFS
PENLAKTSIKLNGQAELFYRPKSRMKRMAHRLGEKMLNKKLKDQKTPIPDTLYQELYDYVNHRLSHDLSDEARALLP
NVITKEVSHEIIKDRRFTSDKFFFHVPITLNYQAANSPSKFNQRVNAYLKEHPETPIIGIDRGERNLIYITVIDSTG
KILEQRSLNTIQQFDYQKKLDNREKERVAARQAWSVVGTIKDLKQGYLSQVIHEIVDLMIHYQAVVVLENLNFGFKS
KRTGIAEKAVYQQFEKMLIDKLNCLVLKDYPAEKVGGVLNPYQLTDQFTSFAKMGTQSGFLFYVPAPYTSKIDPLTG
FVDPFVWKTIKNHESRKHFLEGFDFLHYDVKTGDFILHFKMNRNLSFQRGLPGFMPAWDIVFEKNETQFDAKGTPFI
AGKRIVPVIENHRFTGRYRDLYPANELIALLEEKGIVFRDGSNILPKLLENDDSHAIDTMVALIRSVLQMRNSNAAT
GEDYINSPVRDLNGVCFDSRFQNPEWPMDADANGAYHIALKGQLLLNHLKESKDLKLQNGISNQDWLAYIQELRN
XPXPXPXPXPXPXPXPXPXP
MVSKGEELFTGVVPILVELDGDVNGHKFSVSGEGEGDATYGKLTLKFICTTGKLPVPWPTLVTT
LTYGVQCFSRYPDHMKQHDFFKSAMPEGYVQERTIFFKDDGNYKTRAEVKFEGDTLVNRIELKGIDFKEDGNILGH
KLEYNYNSHNVYIMADKQKNGIKVNFKIRHNIEDGSVQLADHYQQNTPIGDGPVLLPDNHYLSTQSALSKDPNEKR
DHMVLLEFVTAAGITLGMDELYK
SEQ ID NO: 135
MTQFEGFTNLYQVSKTLRFELIPQGKTLKHIQEQGFIEEDKARNDHYKELKPIIDRIYKTYADQCLQLVQLDWENLS
AAIDSYRKEKTEETRNALIEEQATYRNAIHDYFIGRTDNLTDAINKRHAEIYKGLFKAELFNGKVLKQLGTVTTTEH
ENALLRSFDKETTYFSGFYENRKNVFSAEDISTAIPHRIVQDNFPKFKENCHIFTRLITAVPSLREHFENVKKAIGI
FVSTSIEEVFSFPFYNQLLTQTQIDLYNQLLGGISREAGTEKIKGLNEVLNLAIQKNDETAHIIASLPHRFIPLFKQ
ILSDRNTLSFILEEFKSDEEVIQSFCKYKTLLRNENVLETAEALFNELNSIDLTHIFISHKKLETISSALCDHWDTL
RNALYERRISELTGKITKSAKEKVQRSLKHEDINLQEIISAAGKELSEAFKQKTSEILSHAHAALDQPLPTTLKKQE
EKEILKSQLDSLLGLYHLLDWFAVDESNEVDPEFSARLTGIKLEMEPSLSFYNKARNYATKKPYSVEKFKLNFQMPT
LASGWDVNKEKNNGAILFVKNGLYYLGIMPKQKGRYKALSFEPTEKTSEGFDKMYYDYFPDAAKMIPKCSTQLKAVT
AHFQTHTTPILLSNNFIEPLEITKEIYDLNNPEKEPKKFQTAYAKKTGDQKGYREALCKWIDFTRDFLSKYTKTTSI
DLSSLRPSSQYKDLGEYYAELNPLLYHISFQRIAEKEIMDAVETGKLYLFQIYNKDFAKGHHGKPNLHTLYWTGLFS
PENLAKTSIKLNGQAELFYRPKSRMKRMAHRLGEKMLNKKLKDQKTPIPDTLYQELYDYVNHRLSHDLSDEARALLP
NVITKEVSHEIIKDRRFTSDKFFFHVPITLNYQAANSPSKFNQRVNAYLKEHPETPIIGIDRGERNLIYITVIDSTG
KILEQRSLNTIQQFDYQKKLDNREKERVAARQAWSVVGTIKDLKQGYLSQVIHEIVDLMIHYQAVVVLENLNFGFKS
KRTGIAEKAVYQQFEKMLIDKLNCLVLKDYPAEKVGGVLNPYQLTDQFTSFAKMGTQSGFLFYVPAPYTSKIDPLTG
FVDPFVWKTIKNHESRKHFLEGFDFLHYDVKTGDFILHFKMNRNLSFQRGLPGFMPAWDIVFEKNETQFDAKGTPFI
AGKRIVPVIENHRFTGRYRDLYPANELIALLEEKGIVFRDGSNILPKLLENDDSHAIDTMVALIRSVLQMRNSNAAT
GEDYINSPVRDLNGVCFDSRFQNPEWPMDADANGAYHIALKGQLLLNHLKESKDLKLQNGISNQDWLAYIQELRN
XPXPXPXPXPXPXPXPXPXPXP
MVSKGEELFTGVVPILVELDGDVNGHKFSVSGEGEGDATYGKLTLKFICTTGKLPVPWPTLVTT
LTYGVQCFSRYPDHMKQHDFFKSAMPEGYVQERTIFFKDDGNYKTRAEVKFEGDTLVNRIELKGIDFKEDGNILGH
KLEYNYNSHNVYIMADKQKNGIKVNFKIRHNIEDGSVQLADHYQQNTPIGDGPVLLPDNHYLSTQSALSKDPNEKR
DHMVLLEFVTAAGITLGMDELYK
SEQ ID NO: 136
MTQFEGFTNLYQVSKTLRFELIPQGKTLKHIQEQGFIEEDKARNDHYKELKPIIDRIYKTYADQCLQLVQLDWENLS
AAIDSYRKEKTEETRNALIEEQATYRNAIHDYFIGRTDNLTDAINKRHAEIYKGLFKAELFNGKVLKQLGTVTTTEH
ENALLRSFDKETTYFSGFYENRKNVFSAEDISTAIPHRIVQDNFPKFKENCHIFTRLITAVPSLREHFENVKKAIGI
FVSTSIEEVFSFPFYNQLLTQTQIDLYNQLLGGISREAGTEKIKGLNEVLNLAIQKNDETAHIIASLPHRFIPLFKQ
ILSDRNTLSFILEEFKSDEEVIQSFCKYKTLLRNENVLETAEALFNELNSIDLTHIFISHKKLETISSALCDHWDTL
RNALYERRISELTGKITKSAKEKVQRSLKHEDINLQEIISAAGKELSEAFKQKTSEILSHAHAALDQPLPTTLKKQE
EKEILKSQLDSLLGLYHLLDWFAVDESNEVDPEFSARLTGIKLEMEPSLSFYNKARNYATKKPYSVEKFKLNFQMPT
LASGWDVNKEKNNGAILFVKNGLYYLGIMPKQKGRYKALSFEPTEKTSEGFDKMYYDYFPDAAKMIPKCSTQLKAVT
AHFQTHTTPILLSNNFIEPLEITKEIYDLNNPEKEPKKFQTAYAKKTGDQKGYREALCKWIDFTRDFLSKYTKTTSI
DLSSLRPSSQYKDLGEYYAELNPLLYHISFQRIAEKEIMDAVETGKLYLFQIYNKDFAKGHHGKPNLHTLYWTGLFS
PENLAKTSIKLNGQAELFYRPKSRMKRMAHRLGEKMLNKKLKDQKTPIPDTLYQELYDYVNHRLSHDLSDEARALLP
NVITKEVSHEIIKDRRFTSDKFFFHVPITLNYQAANSPSKFNQRVNAYLKEHPETPIIGIDRGERNLIYITVIDSTG
KILEQRSLNTIQQFDYQKKLDNREKERVAARQAWSVVGTIKDLKQGYLSQVIHEIVDLMIHYQAVVVLENLNFGFKS
KRTGIAEKAVYQQFEKMLIDKLNCLVLKDYPAEKVGGVLNPYQLTDQFTSFAKMGTQSGFLFYVPAPYTSKIDPLTG
FVDPFVWKTIKNHESRKHFLEGFDFLHYDVKTGDFILHFKMNRNLSFQRGLPGFMPAWDIVFEKNETQFDAKGTPFI
AGKRIVPVIENHRFTGRYRDLYPANELIALLEEKGIVFRDGSNILPKLLENDDSHAIDTMVALIRSVLQMRNSNAAT
GEDYINSPVRDLNGVCFDSRFQNPEWPMDADANGAYHIALKGQLLLNHLKESKDLKLQNGISNQDWLAYIQELRN
XPXPXPXPXPXPXPXPXPXPXPXP
MVSKGEELFTGVVPILVELDGDVNGHKFSVSGEGEGDATYGKLTLKFICTTGKLPVPWPTLVTT
LTYGVQCFSRYPDHMKQHDFFKSAMPEGYVQERTIFFKDDGNYKTRAEVKFEGDTLVNRIELKGIDFKEDGNILGH
KLEYNYNSHNVYIMADKQKNGIKVNFKIRHNIEDGSVQLADHYQQNTPIGDGPVLLPDNHYLSTQSALSKDPNEKR
DHMVLLEFVTAAGITLGMDELYK
SEQ ID NO: 137
MTQFEGFTNLYQVSKTLRFELIPQGKTLKHIQEQGFIEEDKARNDHYKELKPIIDRIYKTYADQCLQLVQLDWENLS
AAIDSYRKEKTEETRNALIEEQATYRNAIHDYFIGRTDNLTDAINKRHAEIYKGLFKAELFNGKVLKQLGTVTTTEH
ENALLRSFDKETTYFSGFYENRKNVFSAEDISTAIPHRIVQDNFPKFKENCHIFTRLITAVPSLREHFENVKKAIGI
FVSTSIEEVFSFPFYNQLLTQTQIDLYNQLLGGISREAGTEKIKGLNEVLNLAIQKNDETAHIIASLPHRFIPLFKQ
ILSDRNTLSFILEEFKSDEEVIQSFCKYKTLLRNENVLETAEALFNELNSIDLTHIFISHKKLETISSALCDHWDTL
RNALYERRISELTGKITKSAKEKVQRSLKHEDINLQEIISAAGKELSEAFKQKTSEILSHAHAALDQPLPTTLKKQE
EKEILKSQLDSLLGLYHLLDWFAVDESNEVDPEFSARLTGIKLEMEPSLSFYNKARNYATKKPYSVEKFKLNFQMPT
LASGWDVNKEKNNGAILFVKNGLYYLGIMPKQKGRYKALSFEPTEKTSEGFDKMYYDYFPDAAKMIPKCSTQLKAVT
AHFQTHTTPILLSNNFIEPLEITKEIYDLNNPEKEPKKFQTAYAKKTGDQKGYREALCKWIDFTRDFLSKYTKTTSI
DLSSLRPSSQYKDLGEYYAELNPLLYHISFQRIAEKEIMDAVETGKLYLFQIYNKDFAKGHHGKPNLHTLYWTGLFS
PENLAKTSIKLNGQAELFYRPKSRMKRMAHRLGEKMLNKKLKDQKTPIPDTLYQELYDYVNHRLSHDLSDEARALLP
NVITKEVSHEIIKDRRFTSDKFFFHVPITLNYQAANSPSKFNQRVNAYLKEHPETPIIGIDRGERNLIYITVIDSTG
KILEQRSLNTIQQFDYQKKLDNREKERVAARQAWSVVGTIKDLKQGYLSQVIHEIVDLMIHYQAVVVLENLNFGFKS
KRTGIAEKAVYQQFEKMLIDKLNCLVLKDYPAEKVGGVLNPYQLTDQFTSFAKMGTQSGFLFYVPAPYTSKIDPLTG
FVDPFVWKTIKNHESRKHFLEGFDFLHYDVKTGDFILHFKMNRNLSFQRGLPGFMPAWDIVFEKNETQFDAKGTPFI
AGKRIVPVIENHRFTGRYRDLYPANELIALLEEKGIVFRDGSNILPKLLENDDSHAIDTMVALIRSVLQMRNSNAAT
GEDYINSPVRDLNGVCFDSRFQNPEWPMDADANGAYHIALKGQLLLNHLKESKDLKLQNGISNQDWLAYIQELRN
XPXPXPXPXPXPXPXPXPXPXPXPXP
MVSKGEELFTGVVPILVELDGDVNGHKFSVSGEGEGDATYGKLTLKFICTTGKLPVPWPTLVTT
LTYGVQCFSRYPDHMKQHDFFKSAMPEGYVQERTIFFKDDGNYKTRAEVKFEGDTLVNRIELKGIDFKEDGNILGH
KLEYNYNSHNVYIMADKQKNGIKVNFKIRHNIEDGSVQLADHYQQNTPIGDGPVLLPDNHYLSTQSALSKDPNEKR
DHMVLLEFVTAAGITLGMDELYK
SEQ ID NO: 138
MTQFEGFTNLYQVSKTLRFELIPQGKTLKHIQEQGFIEEDKARNDHYKELKPIIDRIYKTYADQCLQLVQLDWENLS
AAIDSYRKEKTEETRNALIEEQATYRNAIHDYFIGRTDNLTDAINKRHAEIYKGLFKAELFNGKVLKQLGTVTTTEH
ENALLRSFDKETTYFSGFYENRKNVFSAEDISTAIPHRIVQDNFPKFKENCHIFTRLITAVPSLREHFENVKKAIGI
FVSTSIEEVFSFPFYNQLLTQTQIDLYNQLLGGISREAGTEKIKGLNEVLNLAIQKNDETAHIIASLPHRFIPLFKQ
ILSDRNTLSFILEEFKSDEEVIQSFCKYKTLLRNENVLETAEALFNELNSIDLTHIFISHKKLETISSALCDHWDTL
RNALYERRISELTGKITKSAKEKVQRSLKHEDINLQEIISAAGKELSEAFKQKTSEILSHAHAALDQPLPTTLKKQE
EKEILKSQLDSLLGLYHLLDWFAVDESNEVDPEFSARLTGIKLEMEPSLSFYNKARNYATKKPYSVEKFKLNFQMPT
LASGWDVNKEKNNGAILFVKNGLYYLGIMPKQKGRYKALSFEPTEKTSEGFDKMYYDYFPDAAKMIPKCSTQLKAVT
AHFQTHTTPILLSNNFIEPLEITKEIYDLNNPEKEPKKFQTAYAKKTGDQKGYREALCKWIDFTRDFLSKYTKTTSI
DLSSLRPSSQYKDLGEYYAELNPLLYHISFQRIAEKEIMDAVETGKLYLFQIYNKDFAKGHHGKPNLHTLYWTGLFS
PENLAKTSIKLNGQAELFYRPKSRMKRMAHRLGEKMLNKKLKDQKTPIPDTLYQELYDYVNHRLSHDLSDEARALLP
NVITKEVSHEIIKDRRFTSDKFFFHVPITLNYQAANSPSKFNQRVNAYLKEHPETPIIGIDRGERNLIYITVIDSTG
KILEQRSLNTIQQFDYQKKLDNREKERVAARQAWSVVGTIKDLKQGYLSQVIHEIVDLMIHYQAVVVLENLNFGFKS
KRTGIAEKAVYQQFEKMLIDKLNCLVLKDYPAEKVGGVLNPYQLTDQFTSFAKMGTQSGFLFYVPAPYTSKIDPLTG
FVDPFVWKTIKNHESRKHFLEGFDFLHYDVKTGDFILHFKMNRNLSFQRGLPGFMPAWDIVFEKNETQFDAKGTPFI
AGKRIVPVIENHRFTGRYRDLYPANELIALLEEKGIVFRDGSNILPKLLENDDSHAIDTMVALIRSVLQMRNSNAAT
GEDYINSPVRDLNGVCFDSRFQNPEWPMDADANGAYHIALKGQLLLNHLKESKDLKLQNGISNQDWLAYIQELRN
XPXPXPXPXPXPXPXPXPXPXPXPXPXP
MVSKGEELFTGVVPILVELDGDVNGHKFSVSGEGEGDATYGKLTLKFICTTGKLPVPWPTLVTT
LTYGVQCFSRYPDHMKQHDFFKSAMPEGYVQERTIFFKDDGNYKTRAEVKFEGDTLVNRIELKGIDFKEDGNILGH
KLEYNYNSHNVYIMADKQKNGIKVNFKIRHNIEDGSVQLADHYQQNTPIGDGPVLLPDNHYLSTQSALSKDPNEKR
DHMVLLEFVTAAGITLGMDELYK
SEQ ID NO: 139
MTQFEGFTNLYQVSKTLRFELIPQGKTLKHIQEQGFIEEDKARNDHYKELKPIIDRIYKTYADQCLQLVQLDWENLS
AAIDSYRKEKTEETRNALIEEQATYRNAIHDYFIGRTDNLTDAINKRHAEIYKGLFKAELFNGKVLKQLGTVTTTEH
ENALLRSFDKFTTYFSGFYENRKNVFSAEDISTAIPHRIVQDNFPKFKENCHIFTRLITAVPSLREHFENVKKAIGI
FVSTSIEEVFSFPFYNQLLTQTQIDLYNQLLGGISREAGTEKIKGLNEVLNLAIQKNDETAHIIASLPHRFIPLFKQ
ILSDRNTLSFILEEFKSDEEVIQSFCKYKTLLRNENVLETAEALFNELNSIDLTHIFISHKKLETISSALCDHWDTL
RNALYERRISELTGKITKSAKEKVQRSLKHEDINLQEIISAAGKELSEAFKQKTSEILSHAHAALDQPLPTTLKKQE
EKEILKSQLDSLLGLYHLLDWFAVDESNEVDPEFSARLTGIKLEMEPSLSFYNKARNYATKKPYSVEKFKLNFQMPT
LASGWDVNKEKNNGAILFVKNGLYYLGIMPKQKGRYKALSFEPTEKTSEGFDKMYYDYFPDAAKMIPKCSTQLKAVT
AHFQTHTTPILLSNNFIEPLEITKEIYDLNNPEKEPKKFQTAYAKKTGDQKGYREALCKWIDFTRDFLSKYTKTTSI
DLSSLRPSSQYKDLGEYYAELNPLLYHISFQRIAEKEIMDAVETGKLYLFQIYNKDFAKGHHGKPNLHTLYWTGLFS
PENLAKTSIKLNGQAELFYRPKSRMKRMAHRLGEKMLNKKLKDQKTPIPDTLYQELYDYVNHRLSHDLSDEARALLP
NVITKEVSHEIIKDRRFTSDKFFFHVPITLNYQAANSPSKFNQRVNAYLKEHPETPIIGIDRGERNLIYITVIDSTG
KILEQRSLNTIQQFDYQKKLDNREKERVAARQAWSVVGTIKDLKQGYLSQVIHEIVDLMIHYQAVVVLENLNFGFKS
KRTGIAEKAVYQQFEKMLIDKLNCLVLKDYPAEKVGGVLNPYQLTDQFTSFAKMGTQSGFLFYVPAPYTSKIDPLTG
FVDPFVWKTIKNHESRKHFLEGFDFLHYDVKTGDFILHFKMNRNLSFQRGLPGFMPAWDIVFEKNETQFDAKGTPFI
AGKRIVPVIENHRFTGRYRDLYPANELIALLEEKGIVFRDGSNILPKLLENDDSHAIDTMVALIRSVLQMRNSNAAT
GEDYINSPVRDLNGVCFDSRFQNPEWPMDADANGAYHIALKGQLLLNHLKESKDLKLQNGISNQDWLAYIQELRN
GGGGSEAAAKGGGGS
MVSKGEELFTGVVPILVELDGDVNGHKFSVSGEGEGDATYGKLTLKFICTTGKLPVPWPTLVTT
LTYGVQCFSRYPDHMKQHDFFKSAMPEGYVQERTIFFKDDGNYKTRAEVKFEGDTLVNRIELKGIDFKEDGNILGH
KLEYNYNSHNVYIMADKQKNGIKVNFKIRHNIEDGSVQLADHYQQNTPIGDGPVLLPDNHYLSTQSALSKDPNEKR
DHMVLLEFVTAAGITLGMDELYK

[0098] Table V.4 provides chimera fusion proteins between AsCas12a amino acid sequences, linker amino acid sequences (underlined), and mCherry amino acid sequences (bolded, italicized).

TABLE V.4
AsCas12a-Linker-mCherry Chimeras

SEQ ID NO: 140
MTQFEGFTNLYQVSKTLRFELIPQGKILKHIQEQGFIEEDKARNDHYKELKPIIDRIYKTYADQCLQLVQLDWENLS
AAIDSYRKEKTEETRNALIEEQATYRNAIHDYFIGRIDNLTDAINKRHAEIYKGLFKAELENGKVLKQLGTVITTEH
ENALLRSEDKETTYFSGEYENRKNVESAEDISTAIPHRIVQDNFPKEKENCHIFTRLITAVPSLREHFENVKKAIGI
FVSTSIEEVESFPFYNQLLTQTQIDLYNQLLGGISREAGTEKIKGLNEVLNLAIQKNDETAHIIASLPHRFIPLEKQ
ILSDRNTLSFILEEEKSDEEVIQSECKYKILLRNENVLETAEALFNELNSIDLTHIFISHKKLETISSALCDHWDTL
RNALYERRISELTGKITKSAKEKVQRSLKHEDINLQEIISAAGKELSEAFKQKTSEILSHAHAALDQPLPTTLKKQE
EKEILKSQLDSLLGLYHLLDWFAVDESNEVDPEFSARLIGIKLEMEPSLSFYNKARNYATKKPYSVEKFKLNFQMPT
LASGWDVNKEKNNGAILFVKNGLYYLGIMPKQKGRYKALSFEPTEKTSEGFDKMYYDYFPDAAKMIPKCSTQLKAVT
AHFQTHTTPILLSNNFIEPLEITKEIYDLNNPEKEPKKFQTAYAKKTGDQKGYREALCKWIDETRDELSKYTKITSI
DLSSLRPSSQYKDLGEYYAELNPLLYHISFQRIAEKEIMDAVETGKLYLFQIYNKDFAKGHHGKPNLHTLYWTGLFS
PENLAKTSIKLNGQAELFYRPKSRMKRMAHRLGEKMLNKKLKDQKTPIPDTLYQELYDYVNHRLSHDLSDEARALLP
NVITKEVSHEIIKDRRFTSDKEFFHVPITLNYQAANSPSKENQRVNAYLKEHPETPIIGIDRGERNLIYITVIDSTG
KILEQRSLNTIQQFDYQKKLDNREKERVAARQAWSVVGTIKDLKQGYLSQVIHEIVDLMIHYQAVVVLENLNEGEKS
KRTGIAEKAVYQQFEKMLIDKLNCLVLKDYPAEKVGGVLNPYQLTDQFTSFAKMGTQSGELFYVPAPYTSKIDPLIG
FVDPFVWKTIKNHESRKHFLEGFDFLHYDVKTGDFILHFKMNRNLSFQRGLPGEMPAWDIVFEKNETQFDAKGTPFI
AGKRIVPVIENHRFTGRYRDLYPANELIALLEEKGIVERDGSNILPKLLENDDSHAIDTMVALIRSVLQMRNSNAAT
GEDYINSPVRDLNGVCEDSREQNPEWPMDADANGAYHIALKGQLLLNHLKESKDLKLQNGISNQDWLAYIQELRN
GSAGSAAGSGEF
MVSKGEEDNMAIIKEFMRFKVHMEGSVNGHEFEIEGEGEGRPYEGTQTAKLKVTKGGPLPFAWDILSPQFMYGSKA
YVKHPADIPDYLKLSFPEGFKWERVMNFEDGGVVTVTQDSSLQDGEFIYKVKLRGTNFPSDGPVMQKKTMGWEASS
ERMYPEDGALKGEIKQRLKLKDGGHYDAEVKTTYKAKKPVQLPGAYNVNIKLDITSHNEDYTIVEQYERAEGRHST
GGMDELYK
SEQ ID NO: 141
MTQFEGFTNLYQVSKTLRFELIPQGKILKHIQEQGFIEEDKARNDHYKELKPIIDRIYKTYADQCLQLVQLDWENLS
AAIDSYRKEKTEETRNALIEEQATYRNAIHDYFIGRIDNLTDAINKRHAEIYKGLFKAELENGKVLKQLGTVITTEH
ENALLRSEDKETTYFSGEYENRKNVESAEDISTAIPHRIVQDNFPKEKENCHIFTRLITAVPSLREHFENVKKAIGI
FVSTSIEEVESFPFYNQLLTQTQIDLYNQLLGGISREAGTEKIKGLNEVLNLAIQKNDETAHIIASLPHRFIPLEKQ
ILSDRNTLSFILEEEKSDEEVIQSECKYKILLRNENVLETAEALFNELNSIDLTHIFISHKKLETISSALCDHWDTL
RNALYERRISELTGKITKSAKEKVQRSLKHEDINLQEIISAAGKELSEAFKQKTSEILSHAHAALDQPLPTTLKKQE
EKEILKSQLDSLLGLYHLLDWFAVDESNEVDPEFSARLIGIKLEMEPSLSFYNKARNYATKKPYSVEKFKLNFQMPT
LASGWDVNKEKNNGAILFVKNGLYYLGIMPKQKGRYKALSFEPTEKTSEGFDKMYYDYFPDAAKMIPKCSTQLKAVT
AHFQTHTTPILLSNNFIEPLEITKEIYDLNNPEKEPKKFQTAYAKKTGDQKGYREALCKWIDETRDELSKYTKITSI
DLSSLRPSSQYKDLGEYYAELNPLLYHISFQRIAEKEIMDAVETGKLYLFQIYNKDFAKGHHGKPNLHTLYWTGLFS
PENLAKTSIKLNGQAELFYRPKSRMKRMAHRLGEKMLNKKLKDQKTPIPDTLYQELYDYVNHRLSHDLSDEARALLP
NVITKEVSHEIIKDRRFTSDKEFFHVPITLNYQAANSPSKENQRVNAYLKEHPETPIIGIDRGERNLIYITVIDSTG
KILEQRSLNTIQQFDYQKKLDNREKERVAARQAWSVVGTIKDLKQGYLSQVIHEIVDLMIHYQAVVVLENLNEGEKS
KRTGIAEKAVYQQFEKMLIDKLNCLVLKDYPAEKVGGVLNPYQLTDQFTSFAKMGTQSGELFYVPAPYTSKIDPLIG
FVDPFVWKTIKNHESRKHFLEGFDFLHYDVKTGDFILHFKMNRNLSFQRGLPGEMPAWDIVFEKNETQFDAKGTPFI
AGKRIVPVIENHRFTGRYRDLYPANELIALLEEKGIVERDGSNILPKLLENDDSHAIDTMVALIRSVLQMRNSNAAT
GEDYINSPVRDLNGVCEDSREQNPEWPMDADANGAYHIALKGQLLLNHLKESKDLKLQNGISNQDWLAYIQELRN
GGGGSGGGGSGGGGSGGGGS
MVSKGEEDNMAIIKEFMRFKVHMEGSVNGHEFEIEGEGEGRPYEGTQTAKLKVTKGGPLPFAWDILSPQFMYGSKA
YVKHPADIPDYLKLSFPEGFKWERVMNFEDGGVVTVTQDSSLQDGEFIYKVKLRGTNFPSDGPVMQKKTMGWEASS
ERMYPEDGALKGEIKQRLKLKDGGHYDAEVKTTYKAKKPVQLPGAYNVNIKLDITSHNEDYTIVEQYERAEGRHST
GGMDELYK
SEQ ID NO: 142
MTQFEGFTNLYQVSKTLRFELIPQGKILKHIQEQGFIEEDKARNDHYKELKPIIDRIYKTYADQCLQLVQLDWENLS
AAIDSYRKEKTEETRNALIEEQATYRNAIHDYFIGRIDNLTDAINKRHAEIYKGLFKAELENGKVLKQLGTVITTEH
ENALLRSEDKETTYFSGEYENRKNVESAEDISTAIPHRIVQDNFPKEKENCHIFTRLITAVPSLREHFENVKKAIGI
FVSTSIEEVESFPFYNQLLTQTQIDLYNQLLGGISREAGTEKIKGLNEVLNLAIQKNDETAHIIASLPHRFIPLEKQ
ILSDRNTLSFILEEEKSDEEVIQSECKYKILLRNENVLETAEALFNELNSIDLTHIFISHKKLETISSALCDHWDTL
RNALYERRISELTGKITKSAKEKVQRSLKHEDINLQEIISAAGKELSEAFKQKTSEILSHAHAALDQPLPTTLKKQE
EKEILKSQLDSLLGLYHLLDWFAVDESNEVDPEFSARLIGIKLEMEPSLSFYNKARNYATKKPYSVEKFKLNFQMPT
LASGWDVNKEKNNGAILFVKNGLYYLGIMPKQKGRYKALSFEPTEKTSEGFDKMYYDYFPDAAKMIPKCSTQLKAVT
AHFQTHTTPILLSNNFIEPLEITKEIYDLNNPEKEPKKFQTAYAKKTGDQKGYREALCKWIDETRDELSKYTKITSI
DLSSLRPSSQYKDLGEYYAELNPLLYHISFQRIAEKEIMDAVETGKLYLFQIYNKDFAKGHHGKPNLHTLYWTGLFS
PENLAKTSIKLNGQAELFYRPKSRMKRMAHRLGEKMLNKKLKDQKTPIPDTLYQELYDYVNHRLSHDLSDEARALLP
NVITKEVSHEIIKDRRFTSDKEFFHVPITLNYQAANSPSKENQRVNAYLKEHPETPIIGIDRGERNLIYITVIDSTG
KILEQRSLNTIQQFDYQKKLDNREKERVAARQAWSVVGTIKDLKQGYLSQVIHEIVDLMIHYQAVVVLENLNEGEKS
KRTGIAEKAVYQQFEKMLIDKLNCLVLKDYPAEKVGGVLNPYQLTDQFTSFAKMGTQSGELFYVPAPYTSKIDPLIG
FVDPFVWKTIKNHESRKHFLEGFDFLHYDVKTGDFILHFKMNRNLSFQRGLPGEMPAWDIVFEKNETQFDAKGTPFI
AGKRIVPVIENHRFTGRYRDLYPANELIALLEEKGIVERDGSNILPKLLENDDSHAIDTMVALIRSVLQMRNSNAAT
GEDYINSPVRDLNGVCEDSREQNPEWPMDADANGAYHIALKGQLLLNHLKESKDLKLQNGISNQDWLAYIQELRN
AEAAAKEAAAKEAAAKEAAAKA
MVSKGEEDNMAIIKEFMRFKVHMEGSVNGHEFEIEGEGEGRPYEGTQTAKLKVTKGGPLPFAWDILSPQFMYGSKA
YVKHPADIPDYLKLSFPEGFKWERVMNFEDGGVVTVTQDSSLQDGEFIYKVKLRGTNFPSDGPVMQKKTMGWEASS
ERMYPEDGALKGEIKQRLKLKDGGHYDAEVKTTYKAKKPVQLPGAYNVNIKLDITSHNEDYTIVEQYERAEGRHST
GGMDELYK
SEQ ID NO: 143
MTQFEGFTNLYQVSKTLRFELIPQGKTLKHIQEQGFIEEDKARNDHYKELKPIIDRIYKTYADQCLQLVQLDWENLS
AAIDSYRKEKTEETRNALIEEQATYRNAIHDYFIGRIDNLTDAINKRHAEIYKGLFKAELENGKVLKQLGTVITTEH
ENALLRSEDKETTYFSGEYENRKNVESAEDISTAIPHRIVQDNFPKEKENCHIFTRLITAVPSLREHFENVKKAIGI
FVSTSIEEVESFPFYNQLLTQTQIDLYNQLLGGISREAGTEKIKGLNEVLNLAIQKNDETAHIIASLPHRFIPLEKQ
ILSDRNTLSFILEEEKSDEEVIQSECKYKILLRNENVLETAEALFNELNSIDLTHIFISHKKLETISSALCDHWDTL
RNALYERRISELTGKITKSAKEKVQRSLKHEDINLQEIISAAGKELSEAFKQKTSEILSHAHAALDQPLPTTLKKQE
EKEILKSQLDSLLGLYHLLDWFAVDESNEVDPEFSARLIGIKLEMEPSLSFYNKARNYATKKPYSVEKFKLNFQMPT
LASGWDVNKEKNNGAILFVKNGLYYLGIMPKQKGRYKALSFEPTEKTSEGFDKMYYDYFPDAAKMIPKCSTQLKAVT
AHFQTHTTPILLSNNFIEPLEITKEIYDLNNPEKEPKKFQTAYAKKTGDQKGYREALCKWIDETRDELSKYTKITSI
DLSSLRPSSQYKDLGEYYAELNPLLYHISFQRIAEKEIMDAVETGKLYLFQIYNKDFAKGHHGKPNLHTLYWTGLFS
PENLAKTSIKLNGQAELFYRPKSRMKRMAHRLGEKMLNKKLKDQKTPIPDTLYQELYDYVNHRLSHDLSDEARALLP
NVITKEVSHEIIKDRRFTSDKEFFHVPITLNYQAANSPSKENQRVNAYLKEHPETPIIGIDRGERNLIYITVIDSTG
KILEQRSLNTIQQFDYQKKLDNREKERVAARQAWSVVGTIKDLKQGYLSQVIHEIVDLMIHYQAVVVLENLNEGEKS
KRTGIAEKAVYQQFEKMLIDKLNCLVLKDYPAEKVGGVLNPYQLTDQFTSFAKMGTQSGELFYVPAPYTSKIDPLIG
FVDPFVWKTIKNHESRKHFLEGFDFLHYDVKTGDFILHFKMNRNLSFQRGLPGEMPAWDIVFEKNETQFDAKGTPFI
AGKRIVPVIENHRFTGRYRDLYPANELIALLEEKGIVERDGSNILPKLLENDDSHAIDTMVALIRSVLQMRNSNAAT
GEDYINSPVRDLNGVCEDSREQNPEWPMDADANGAYHIALKGQLLLNHLKESKDLKLQNGISNQDWLAYIQELRN
AEAAAKEAAAKEAAAKEAAAKALEAEAAAKEAAAKEAAAKEAAAKA
MVSKGEEDNMAIIKEFMRFKVHMEGSVNGHEFEIEGEGEGRPYEGTQTAKLKVTKGGPLPFAWDILSPQFMYGSKA
YVKHPADIPDYLKLSFPEGFKWERVMNFEDGGVVTVTQDSSLQDGEFIYKVKLRGTNFPSDGPVMQKKTMGWEASS
ERMYPEDGALKGEIKQRLKLKDGGHYDAEVKTTYKAKKPVQLPGAYNVNIKLDITSHNEDYTIVEQYERAEGRHST
GGMDELYK
SEQ ID NO: 144
MTQFEGFTNLYQVSKTLRFELIPQGKTLKHIQEQGFIEEDKARNDHYKELKPIIDRIYKTYADQCLQLVQLDWENLS
AAIDSYRKEKTEETRNALIEEQATYRNAIHDYFIGRIDNLTDAINKRHAEIYKGLFKAELENGKVLKQLGTVITTEH
ENALLRSEDKETTYFSGEYENRKNVESAEDISTAIPHRIVQDNFPKEKENCHIFTRLITAVPSLREHFENVKKAIGI
FVSTSIEEVESFPFYNQLLTQTQIDLYNQLLGGISREAGTEKIKGLNEVLNLAIQKNDETAHIIASLPHRFIPLEKQ
ILSDRNTLSFILEEEKSDEEVIQSECKYKILLRNENVLETAEALFNELNSIDLTHIFISHKKLETISSALCDHWDTL
RNALYERRISELTGKITKSAKEKVQRSLKHEDINLQEIISAAGKELSEAFKQKTSEILSHAHAALDQPLPTTLKKQE
EKEILKSQLDSLLGLYHLLDWFAVDESNEVDPEFSARLIGIKLEMEPSLSFYNKARNYATKKPYSVEKFKLNFQMPT
LASGWDVNKEKNNGAILFVKNGLYYLGIMPKQKGRYKALSFEPTEKTSEGFDKMYYDYFPDAAKMIPKCSTQLKAVT
AHFQTHTTPILLSNNFIEPLEITKEIYDLNNPEKEPKKFQTAYAKKTGDQKGYREALCKWIDETRDELSKYTKITSI
DLSSLRPSSQYKDLGEYYAELNPLLYHISFQRIAEKEIMDAVETGKLYLFQIYNKDFAKGHHGKPNLHTLYWTGLFS
PENLAKTSIKLNGQAELFYRPKSRMKRMAHRLGEKMLNKKLKDQKTPIPDTLYQELYDYVNHRLSHDLSDEARALLP
NVITKEVSHEIIKDRRFTSDKEFFHVPITLNYQAANSPSKENQRVNAYLKEHPETPIIGIDRGERNLIYITVIDSTG
KILEQRSLNTIQQFDYQKKLDNREKERVAARQAWSVVGTIKDLKQGYLSQVIHEIVDLMIHYQAVVVLENLNEGEKS
KRTGIAEKAVYQQFEKMLIDKLNCLVLKDYPAEKVGGVLNPYQLTDQFTSFAKMGTQSGELFYVPAPYTSKIDPLIG
FVDPFVWKTIKNHESRKHFLEGFDFLHYDVKTGDFILHFKMNRNLSFQRGLPGEMPAWDIVFEKNETQFDAKGTPFI
AGKRIVPVIENHRFTGRYRDLYPANELIALLEEKGIVERDGSNILPKLLENDDSHAIDTMVALIRSVLQMRNSNAAT
GEDYINSPVRDLNGVCEDSREQNPEWPMDADANGAYHIALKGQLLLNHLKESKDLKLQNGISNQDWLAYIQELRN
LEAEAAAKEAAAKEAAAKEAAAKALEAEAAAKEAAAKEAAAKEAAAKALE
MVSKGEEDNMAIIKEFMRFKVHMEGSVNGHEFEIEGEGEGRPYEGTQTAKLKVTKGGPLPFAWDILSPQFMYGSKA
YVKHPADIPDYLKLSFPEGFKWERVMNFEDGGVVTVTQDSSLQDGEFIYKVKLRGTNFPSDGPVMQKKTMGWEASS
ERMYPEDGALKGEIKQRLKLKDGGHYDAEVKTTYKAKKPVQLPGAYNVNIKLDITSHNEDYTIVEQYERAEGRHST
GGMDELYK
SEQ ID NO: 145
MTQFEGFTNLYQVSKTLRFELIPQGKTLKHIQEQGFIEEDKARNDHYKELKPIIDRIYKTYADQCLQLVQLDWENLS
AAIDSYRKEKTEETRNALIEEQATYRNAIHDYFIGRIDNLTDAINKRHAEIYKGLFKAELENGKVLKQLGTVITTEH
ENALLRSEDKETTYFSGEYENRKNVESAEDISTAIPHRIVQDNFPKEKENCHIFTRLITAVPSLREHFENVKKAIGI
FVSTSIEEVESFPFYNQLLTQTQIDLYNQLLGGISREAGTEKIKGLNEVLNLAIQKNDETAHIIASLPHRFIPLEKQ
ILSDRNTLSFILEEEKSDEEVIQSECKYKILLRNENVLETAEALFNELNSIDLTHIFISHKKLETISSALCDHWDTL
RNALYERRISELTGKITKSAKEKVQRSLKHEDINLQEIISAAGKELSEAFKQKTSEILSHAHAALDQPLPTTLKKQE
EKEILKSQLDSLLGLYHLLDWFAVDESNEVDPEFSARLIGIKLEMEPSLSFYNKARNYATKKPYSVEKFKLNFQMPT
LASGWDVNKEKNNGAILFVKNGLYYLGIMPKQKGRYKALSFEPTEKTSEGFDKMYYDYFPDAAKMIPKCSTQLKAVT
AHFQTHTTPILLSNNFIEPLEITKEIYDLNNPEKEPKKFQTAYAKKTGDQKGYREALCKWIDETRDELSKYTKITSI
DLSSLRPSSQYKDLGEYYAELNPLLYHISFQRIAEKEIMDAVETGKLYLFQIYNKDFAKGHHGKPNLHTLYWTGLFS
PENLAKTSIKLNGQAELFYRPKSRMKRMAHRLGEKMLNKKLKDQKTPIPDTLYQELYDYVNHRLSHDLSDEARALLP
NVITKEVSHEIIKDRRFTSDKEFFHVPITLNYQAANSPSKENQRVNAYLKEHPETPIIGIDRGERNLIYITVIDSTG
KILEQRSLNTIQQFDYQKKLDNREKERVAARQAWSVVGTIKDLKQGYLSQVIHEIVDLMIHYQAVVVLENLNEGEKS
KRTGIAEKAVYQQFEKMLIDKLNCLVLKDYPAEKVGGVLNPYQLTDQFTSFAKMGTQSGELFYVPAPYTSKIDPLIG
FVDPFVWKTIKNHESRKHFLEGFDFLHYDVKTGDFILHFKMNRNLSFQRGLPGEMPAWDIVFEKNETQFDAKGTPFI
AGKRIVPVIENHRFTGRYRDLYPANELIALLEEKGIVERDGSNILPKLLENDDSHAIDTMVALIRSVLQMRNSNAAT
GEDYINSPVRDLNGVCEDSREQNPEWPMDADANGAYHIALKGQLLLNHLKESKDLKLQNGISNQDWLAYIQELRN
APA
MVSKGEEDNMAIIKEFMRFKVHMEGSVNGHEFEIEGEGEGRPYEGTQTAKLKVTKGGPLPFAWDILSPQFMYGSKA
YVKHPADIPDYLKLSFPEGFKWERVMNFEDGGVVTVTQDSSLQDGEFIYKVKLRGTNFPSDGPVMQKKTMGWEASS
ERMYPEDGALKGEIKQRLKLKDGGHYDAEVKTTYKAKKPVQLPGAYNVNIKLDITSHNEDYTIVEQYERAEGRHST
GGMDELYK
SEQ ID NO: 146
MTQFEGFTNLYQVSKTLRFELIPQGKILKHIQEQGFIEEDKARNDHYKELKPIIDRIYKTYADQCLQLVQLDWENLS
AAIDSYRKEKTEETRNALIEEQATYRNAIHDYFIGRIDNLTDAINKRHAEIYKGLFKAELENGKVLKQLGTVITTEH
ENALLRSEDKETTYFSGEYENRKNVESAEDISTAIPHRIVQDNFPKEKENCHIFTRLITAVPSLREHFENVKKAIGI
FVSTSIEEVESFPFYNQLLTQTQIDLYNQLLGGISREAGTEKIKGLNEVLNLAIQKNDETAHIIASLPHRFIPLEKQ
ILSDRNTLSFILEEEKSDEEVIQSECKYKILLRNENVLETAEALFNELNSIDLTHIFISHKKLETISSALCDHWDTL
RNALYERRISELTGKITKSAKEKVQRSLKHEDINLQEIISAAGKELSEAFKQKTSEILSHAHAALDQPLPTTLKKQE
EKEILKSQLDSLLGLYHLLDWFAVDESNEVDPEFSARLIGIKLEMEPSLSFYNKARNYATKKPYSVEKFKLNFQMPT
LASGWDVNKEKNNGAILFVKNGLYYLGIMPKQKGRYKALSFEPTEKTSEGFDKMYYDYFPDAAKMIPKCSTQLKAVT
AHFQTHTTPILLSNNFIEPLEITKEIYDLNNPEKEPKKFQTAYAKKTGDQKGYREALCKWIDETRDELSKYTKITSI
DLSSLRPSSQYKDLGEYYAELNPLLYHISFQRIAEKEIMDAVETGKLYLFQIYNKDFAKGHHGKPNLHTLYWTGLFS
PENLAKTSIKLNGQAELFYRPKSRMKRMAHRLGEKMLNKKLKDQKTPIPDTLYQELYDYVNHRLSHDLSDEARALLP
NVITKEVSHEIIKDRRFTSDKEFFHVPITLNYQAANSPSKENQRVNAYLKEHPETPIIGIDRGERNLIYITVIDSTG
KILEQRSLNTIQQFDYQKKLDNREKERVAARQAWSVVGTIKDLKQGYLSQVIHEIVDLMIHYQAVVVLENLNEGEKS
KRTGIAEKAVYQQFEKMLIDKLNCLVLKDYPAEKVGGVLNPYQLTDQFTSFAKMGTQSGELFYVPAPYTSKIDPLIG
FVDPFVWKTIKNHESRKHFLEGFDFLHYDVKTGDFILHFKMNRNLSFQRGLPGEMPAWDIVFEKNETQFDAKGTPFI
AGKRIVPVIENHRFTGRYRDLYPANELIALLEEKGIVERDGSNILPKLLENDDSHAIDTMVALIRSVLQMRNSNAAT
GEDYINSPVRDLNGVCEDSREQNPEWPMDADANGAYHIALKGQLLLNHLKESKDLKLQNGISNQDWLAYIQELRN
APAPA
MVSKGEEDNMAIIKEFMRFKVHMEGSVNGHEFEIEGEGEGRPYEGTQTAKLKVTKGGPLPFAWDILSPQFMYGSKA
YVKHPADIPDYLKLSFPEGFKWERVMNFEDGGVVTVTQDSSLQDGEFIYKVKLRGTNFPSDGPVMQKKTMGWEASS
ERMYPEDGALKGEIKQRLKLKDGGHYDAEVKTTYKAKKPVQLPGAYNVNIKLDITSHNEDYTIVEQYERAEGRHST
GGMDELYK
SEQ ID NO: 147
MTQFEGFTNLYQVSKTLRFELIPQGKILKHIQEQGFIEEDKARNDHYKELKPIIDRIYKTYADQCLQLVQLDWENLS
AAIDSYRKEKTEETRNALIEEQATYRNAIHDYFIGRIDNLTDAINKRHAEIYKGLFKAELENGKVLKQLGTVITTEH
ENALLRSEDKETTYFSGEYENRKNVESAEDISTAIPHRIVQDNFPKEKENCHIFTRLITAVPSLREHFENVKKAIGI
FVSTSIEEVESFPFYNQLLTQTQIDLYNQLLGGISREAGTEKIKGLNEVLNLAIQKNDETAHIIASLPHRFIPLEKQ
ILSDRNTLSFILEEEKSDEEVIQSECKYKILLRNENVLETAEALFNELNSIDLTHIFISHKKLETISSALCDHWDTL
RNALYERRISELTGKITKSAKEKVQRSLKHEDINLQEIISAAGKELSEAFKQKTSEILSHAHAALDQPLPTTLKKQE
EKEILKSQLDSLLGLYHLLDWFAVDESNEVDPEFSARLIGIKLEMEPSLSFYNKARNYATKKPYSVEKFKLNFQMPT
LASGWDVNKEKNNGAILFVKNGLYYLGIMPKQKGRYKALSFEPTEKTSEGFDKMYYDYFPDAAKMIPKCSTQLKAVT
AHFQTHTTPILLSNNFIEPLEITKEIYDLNNPEKEPKKFQTAYAKKTGDQKGYREALCKWIDETRDELSKYTKITSI
DLSSLRPSSQYKDLGEYYAELNPLLYHISFQRIAEKEIMDAVETGKLYLFQIYNKDFAKGHHGKPNLHTLYWTGLFS
PENLAKTSIKLNGQAELFYRPKSRMKRMAHRLGEKMLNKKLKDQKTPIPDTLYQELYDYVNHRLSHDLSDEARALLP
NVITKEVSHEIIKDR RFTSDKEFFHVPITLNYQAANSPSKFNQRVNAYLKEHPETPIIGIDRGERNLIYITVIDSTG
KILEQRSLNTIQQFDYQKKLDNREKERVAARQAWSVVGTIKDLKQGYLSQVIHEIVDLMIHYQAVVVLENLNEGEKS
KRTGIAEKAVYQQFEKMLIDKLNCLVLKDYPAEKVGGVLNPYQLTDQFTSFAKMGTQSGELFYVPAPYTSKIDPLTG
FVDPFVWKTIKNHESRKHFLEGFDFLHYDVKTGDFILHFKMNRNLSFQRGLPGEMPAWDIVFEKNETQFDAKGTPFI
AGKRIVPVIENHRFTGRYRDLYPANELIALLEEKGIVFRDGSNILPKLLENDDSHAIDTMVALIRSVLQMRNSNAAT
GEDYINSPVRDLNGVCEDSREQNPEWPMDADANGAYHIALKGQLLLNHLKESKDLKLQNGISNQDWLAYIQELRN
APAPAPA
MVSKGEEDNMAIIKEFMRFKVHMEGSVNGHEFEIEGEGEGRPYEGTQTAKLKVTKGGPLPFAWDILSPQFMYGSKA
YVKHPADIPDYLKLSFPEGFKWERVMNFEDGGVVTVTQDSSLQDGEFIYKVKLRGTNFPSDGPVMQKKTMGWEASS
ERMYPEDGALKGEIKQRLKLKDGGHYDAEVKTTYKAKKPVQLPGAYNVNIKLDITSHNEDYTIVEQYERAEGRHST
GGMDELYK
SEQ ID NO: 148
MTQFEGFTNLYQVSKTLRFELIPQGKTLKHIQEQGFIEEDKARNDHYKELKPIIDRIYKTYADQCLQLVQLDWENLS
AAIDSYRKEKTEETRNALIEEQATYRNAIHDYFIGRIDNLTDAINKRHAEIYKGLFKAELENGKVLKQLGTVITTEH
ENALLRSFDKETTYFSGEYENRKNVESAEDISTAIPHRIVQDNFPKEKENCHIFTRLITAVPSLREHFENVKKAIGI
FVSTSIEEVFSFPFYNQLLTQTQIDLYNQLLGGISREAGTEKIKGLNEVLNLAIQKNDETAHIIASLPHRFIPLFKQ
ILSDRNTLSFILEEFKSDEEVIQSFCKYKILLRNENVLETAEALFNELNSIDLTHIFISHKKLETISSALCDHWDTL
RNALYERRISELTGKITKSAKEKVQRSLKHEDINLQEIISAAGKELSEAFKQKTSEILSHAHAALDQPLPTTLKKQE
EKEILKSQLDSLLGLYHLLDWFAVDESNEVDPEFSARLTGIKLEMEPSLSFYNKARNYATKKPYSVEKFKLNFQMPT
LASGWDVNKEKNNGAILFVKNGLYYLGIMPKQKGRYKALSFEPTEKTSEGFDKMYYDYFPDAAKMIPKCSTQLKAVT
AHFQTHTTPILLSNNFIEPLEITKEIYDLNNPEKEPKKFQTAYAKKTGDQKGYREALCKWIDETRDELSKYTKTTSI
DLSSLRPSSQYKDLGEYYAELNPLLYHISFQRIAEKEIMDAVETGKLYLFQIYNKDFAKGHHGKPNLHTLYWTGLFS
PENLAKTSIKLNGQAELFYRPKSRMKRMAHRLGEKMLNKKLKDQKTPIPDTLYQELYDYVNHRLSHDLSDEARALLP
NVITKEVSHEIIKDRRFTSDKEFFHVPITLNYQAANSPSKFNQRVNAYLKEHPETPIIGIDRGERNLIYITVIDSTG
KILEQRSLNTIQQFDYQKKLDNREKERVAARQAWSVVGTIKDLKQGYLSQVIHEIVDLMIHYQAVVVLENLNEGEKS
KRTGIAEKAVYQQFEKMLIDKLNCLVLKDYPAEKVGGVLNPYQLTDQFTSFAKMGTQSGELFYVPAPYTSKIDPLTG
FVDPFVWKTIKNHESRKHFLEGFDFLHYDVKTGDFILHFKMNRNLSFQRGLPGEMPAWDIVFEKNETQFDAKGTPFI
AGKRIVPVIENHRFTGRYRDLYPANELIALLEEKGIVFRDGSNILPKLLENDDSHAIDTMVALIRSVLQMRNSNAAT
GEDYINSPVRDLNGVCEDSREQNPEWPMDADANGAYHIALKGQLLLNHLKESKDLKLQNGISNQDWLAYIQELRN
APAPAPAPA
MVSKGEEDNMAIIKEFMRFKVHMEGSVNGHEFEIEGEGEGRPYEGTQTAKLKVTKGGPLPFAWDILSPQFMYGSKA
YVKHPADIPDYLKLSFPEGFKWERVMNFEDGGVVTVTQDSSLQDGEFIYKVKLRGTNFPSDGPVMQKKTMGWEASS
ERMYPEDGALKGEIKQRLKLKDGGHYDAEVKTTYKAKKPVQLPGAYNVNIKLDITSHNEDYTIVEQYERAEGRHST
GGMDELYK
SEQ ID NO: 149
MTQFEGFTNLYQVSKTLRFELIPQGKTLKHIQEQGFIEEDKARNDHYKELKPIIDRIYKTYADQCLQLVQLDWENLS
AAIDSYRKEKTEETRNALIEEQATYRNAIHDYFIGRIDNLTDAINKRHAEIYKGLFKAELENGKVLKQLGTVITTEH
ENALLRSFDKETTYFSGEYENRKNVESAEDISTAIPHRIVQDNFPKEKENCHIFTRLITAVPSLREHFENVKKAIGI
FVSTSIEEVFSFPFYNQLLTQTQIDLYNQLLGGISREAGTEKIKGLNEVLNLAIQKNDETAHIIASLPHRFIPLFKQ
ILSDRNTLSFILEEFKSDEEVIQSFCKYKILLRNENVLETAEALFNELNSIDLTHIFISHKKLETISSALCDHWDTL
RNALYERRISELTGKITKSAKEKVQRSLKHEDINLQEIISAAGKELSEAFKQKTSEILSHAHAALDQPLPTTLKKQE
EKEILKSQLDSLLGLYHLLDWFAVDESNEVDPEFSARLTGIKLEMEPSLSFYNKARNYATKKPYSVEKFKLNFQMPT
LASGWDVNKEKNNGAILFVKNGLYYLGIMPKQKGRYKALSFEPTEKTSEGFDKMYYDYFPDAAKMIPKCSTQLKAVT
AHFQTHTTPILLSNNFIEPLEITKEIYDLNNPEKEPKKFQTAYAKKTGDQKGYREALCKWIDETRDELSKYTKTTSI
DLSSLRPSSQYKDLGEYYAELNPLLYHISFQRIAEKEIMDAVETGKLYLFQIYNKDFAKGHHGKPNLHTLYWTGLFS
PENLAKTSIKLNGQAELFYRPKSRMKRMAHRLGEKMLNKKLKDQKTPIPDTLYQELYDYVNHRLSHDLSDEARALLP
NVITKEVSHEIIKDRRFTSDKEFFHVPITLNYQAANSPSKFNQRVNAYLKEHPETPIIGIDRGERNLIYITVIDSTG
KILEQRSLNTIQQFDYQKKLDNREKERVAARQAWSVVGTIKDLKQGYLSQVIHEIVDLMIHYQAVVVLENLNEGEKS
KRTGIAEKAVYQQFEKMLIDKLNCLVLKDYPAEKVGGVLNPYQLTDQFTSFAKMGTQSGELFYVPAPYTSKIDPLTG
FVDPFVWKTIKNHESRKHFLEGFDFLHYDVKTGDFILHFKMNRNLSFQRGLPGEMPAWDIVFEKNETQFDAKGTPFI
AGKRIVPVIENHRFTGRYRDLYPANELIALLEEKGIVFRDGSNILPKLLENDDSHAIDTMVALIRSVLQMRNSNAAT
GEDYINSPVRDLNGVCEDSREQNPEWPMDADANGAYHIALKGQLLLNHLKESKDLKLQNGISNQDWLAYIQELRN
APAPAPAPAPA
MVSKGEEDNMAIIKEFMRFKVHMEGSVNGHEFEIEGEGEGRPYEGTQTAKLKVTKGGPLPFAWDILSPQFMYGSKA
YVKHPADIPDYLKLSFPEGFKWERVMNFEDGGVVTVTQDSSLQDGEFIYKVKLRGTNFPSDGPVMQKKTMGWEASS
ERMYPEDGALKGEIKQRLKLKDGGHYDAEVKTTYKAKKPVQLPGAYNVNIKLDITSHNEDYTIVEQYERAEGRHST
GGMDELYK
SEQ ID NO: 150
MTQFEGFTNLYQVSKTLRFELIPQGKILKHIQEQGFIEEDKARNDHYKELKPIIDRIYKTYADQCLQLVQLDWENLS
AAIDSYRKEKTEETRNALIEEQATYRNAIHDYFIGRIDNLTDAINKRHAEIYKGLFKAELENGKVLKQLGTVITTEH
ENALLRSEDKETTYFSGEYENRKNVESAEDISTAIPHRIVQDNFPKEKENCHIFTRLITAVPSLREHFENVKKAIGI
FVSTSIEEVESFPFYNQLLTQTQIDLYNQLLGGISREAGTEKIKGLNEVLNLAIQKNDETAHIIASLPHRFIPLEKQ
ILSDRNTLSFILEEEKSDEEVIQSECKYKILLRNENVLETAEALFNELNSIDLTHIFISHKKLETISSALCDHWDTL
RNALYERRISELTGKITKSAKEKVQRSLKHEDINLQEIISAAGKELSEAFKQKTSEILSHAHAALDQPLPTTLKKQE
EKEILKSQLDSLLGLYHLLDWFAVDESNEVDPEFSARLIGIKLEMEPSLSFYNKARNYATKKPYSVEKFKLNFQMPT
LASGWDVNKEKNNGAILFVKNGLYYLGIMPKQKGRYKALSFEPTEKTSEGFDKMYYDYFPDAAKMIPKCSTQLKAVT
AHFQTHTTPILLSNNFIEPLEITKEIYDLNNPEKEPKKFQTAYAKKTGDQKGYREALCKWIDETRDELSKYTKITSI
DLSSLRPSSQYKDLGEYYAELNPLLYHISFQRIAEKEIMDAVETGKLYLFQIYNKDFAKGHHGKPNLHTLYWTGLFS
PENLAKTSIKLNGQAELFYRPKSRMKRMAHRLGEKMLNKKLKDQKTPIPDTLYQELYDYVNHRLSHDLSDEARALLP
NVITKEVSHEIIKDRRFTSDKEFFHVPITLNYQAANSPSKENQRVNAYLKEHPETPIIGIDRGERNLIYITVIDSTG
KILEQRSLNTIQQFDYQKKLDNREKERVAARQAWSVVGTIKDLKQGYLSQVIHEIVDLMIHYQAVVVLENLNEGEKS
KRTGIAEKAVYQQFEKMLIDKLNCLVLKDYPAEKVGGVLNPYQLTDQFTSFAKMGTQSGELFYVPAPYTSKIDPLIG
FVDPFVWKTIKNHESRKHFLEGFDFLHYDVKTGDFILHFKMNRNLSFQRGLPGEMPAWDIVFEKNETQFDAKGTPFI
AGKRIVPVIENHRFTGRYRDLYPANELIALLEEKGIVERDGSNILPKLLENDDSHAIDTMVALIRSVLQMRNSNAAT
GEDYINSPVRDLNGVCEDSREQNPEWPMDADANGAYHIALKGQLLLNHLKESKDLKLQNGISNQDWLAYIQELRN
APAPAPAPAPAPA
MVSKGEEDNMAIIKEFMRFKVHMEGSVNGHEFEIEGEGEGRPYEGTQTAKLKVTKGGPLPFAWDILSPQFMYGSKA
YVKHPADIPDYLKLSFPEGFKWERVMNFEDGGVVTVTQDSSLQDGEFIYKVKLRGTNFPSDGPVMQKKTMGWEASS
ERMYPEDGALKGEIKQRLKLKDGGHYDAEVKTTYKAKKPVQLPGAYNVNIKLDITSHNEDYTIVEQYERAEGRHST
GGMDELYK
SEQ ID NO: 151
MTQFEGFTNLYQVSKTLRFELIPQGKILKHIQEQGFIEEDKARNDHYKELKPIIDRIYKTYADQCLQLVQLDWENLS
AAIDSYRKEKTEETRNALIEEQATYRNAIHDYFIGRIDNLTDAINKRHAEIYKGLFKAELENGKVLKQLGTVITTEH
ENALLRSEDKETTYFSGEYENRKNVESAEDISTAIPHRIVQDNFPKEKENCHIFTRLITAVPSLREHFENVKKAIGI
FVSTSIEEVESFPFYNQLLTQTQIDLYNQLLGGISREAGTEKIKGLNEVLNLAIQKNDETAHIIASLPHRFIPLEKQ
ILSDRNTLSFILEEEKSDEEVIQSECKYKILLRNENVLETAEALFNELNSIDLTHIFISHKKLETISSALCDHWDTL
RNALYERRISELTGKITKSAKEKVQRSLKHEDINLQEIISAAGKELSEAFKQKTSEILSHAHAALDQPLPTTLKKQE
EKEILKSQLDSLLGLYHLLDWFAVDESNEVDPEFSARLIGIKLEMEPSLSFYNKARNYATKKPYSVEKFKLNFQMPT
LASGWDVNKEKNNGAILFVKNGLYYLGIMPKQKGRYKALSFEPTEKTSEGFDKMYYDYFPDAAKMIPKCSTQLKAVT
AHFQTHTTPILLSNNFIEPLEITKEIYDLNNPEKEPKKFQTAYAKKTGDQKGYREALCKWIDETRDELSKYTKITSI
DLSSLRPSSQYKDLGEYYAELNPLLYHISFQRIAEKEIMDAVETGKLYLFQIYNKDFAKGHHGKPNLHTLYWTGLFS
PENLAKTSIKLNGQAELFYRPKSRMKRMAHRLGEKMLNKKLKDQKTPIPDTLYQELYDYVNHRLSHDLSDEARALLP
NVITKEVSHEIIKDRRFTSDKEFFHVPITLNYQAANSPSKENQRVNAYLKEHPETPIIGIDRGERNLIYITVIDSTG
KILEQRSLNTIQQFDYQKKLDNREKERVAARQAWSVVGTIKDLKQGYLSQVIHEIVDLMIHYQAVVVLENLNEGEKS
KRTGIAEKAVYQQFEKMLIDKLNCLVLKDYPAEKVGGVLNPYQLTDQFTSFAKMGTQSGELFYVPAPYTSKIDPLIG
FVDPFVWKTIKNHESRKHFLEGFDFLHYDVKTGDFILHFKMNRNLSFQRGLPGEMPAWDIVFEKNETQFDAKGTPFI
AGKRIVPVIENHRFTGRYRDLYPANELIALLEEKGIVERDGSNILPKLLENDDSHAIDTMVALIRSVLQMRNSNAAT
GEDYINSPVRDLNGVCEDSREQNPEWPMDADANGAYHIALKGQLLLNHLKESKDLKLQNGISNQDWLAYIQELRN
APAPAPAPAPAPAPA
MVSKGEEDNMAIIKEFMRFKVHMEGSVNGHEFEIEGEGEGRPYEGTQTAKLKVTKGGPLPFAWDILSPQFMYGSKA
YVKHPADIPDYLKLSFPEGFKWERVMNFEDGGVVTVTQDSSLQDGEFIYKVKLRGTNFPSDGPVMQKKTMGWEASS
ERMYPEDGALKGEIKQRLKLKDGGHYDAEVKTTYKAKKPVQLPGAYNVNIKLDITSHNEDYTIVEQYERAEGRHST
GGMDELYK
SEQ ID NO: 152
MTQFEGFTNLYQVSKTLRFELIPQGKILKHIQEQGFIEEDKARNDHYKELKPIIDRIYKTYADQCLQLVQLDWENLS
AAIDSYRKEKTEETRNALIEEQATYRNAIHDYFIGRIDNLTDAINKRHAEIYKGLFKAELENGKVLKQLGTVITTEH
ENALLRSEDKETTYFSGEYENRKNVESAEDISTAIPHRIVQDNFPKEKENCHIFTRLITAVPSLREHFENVKKAIGI
FVSTSIEEVESFPFYNQLLTQTQIDLYNQLLGGISREAGTEKIKGLNEVLNLAIQKNDETAHIIASLPHRFIPLEKQ
ILSDRNTLSFILEEEKSDEEVIQSECKYKILLRNENVLETAEALFNELNSIDLTHIFISHKKLETISSALCDHWDTL
RNALYERRISELTGKITKSAKEKVQRSLKHEDINLQEIISAAGKELSEAFKQKTSEILSHAHAALDQPLPTTLKKQE
EKEILKSQLDSLLGLYHLLDWFAVDESNEVDPEFSARLIGIKLEMEPSLSFYNKARNYATKKPYSVEKFKLNFQMPT
LASGWDVNKEKNNGAILFVKNGLYYLGIMPKQKGRYKALSFEPTEKTSEGFDKMYYDYFPDAAKMIPKCSTQLKAVT
AHFQTHTTPILLSNNFIEPLEITKEIYDLNNPEKEPKKFQTAYAKKTGDQKGYREALCKWIDETRDELSKYTKITSI
DLSSLRPSSQYKDLGEYYAELNPLLYHISFQRIAEKEIMDAVETGKLYLFQIYNKDFAKGHHGKPNLHTLYWTGLFS
PENLAKTSIKLNGQAELFYRPKSRMKRMAHRLGEKMLNKKLKDQKTPIPDTLYQELYDYVNHRLSHDLSDEARALLP
NVITKEVSHEIIKDRRFTSDKEFFHVPITLNYQAANSPSKENQRVNAYLKEHPETPIIGIDRGERNLIYITVIDSTG
KILEQRSLNTIQQFDYQKKLDNREKERVAARQAWSVVGTIKDLKQGYLSQVIHEIVDLMIHYQAVVVLENLNEGEKS
KRTGIAEKAVYQQFEKMLIDKLNCLVLKDYPAEKVGGVLNPYQLTDQFTSFAKMGTQSGELFYVPAPYTSKIDPLIG
FVDPFVWKTIKNHESRKHFLEGFDFLHYDVKTGDFILHFKMNRNLSFQRGLPGEMPAWDIVFEKNETQFDAKGTPFI
AGKRIVPVIENHRFTGRYRDLYPANELIALLEEKGIVERDGSNILPKLLENDDSHAIDTMVALIRSVLQMRNSNAAT
GEDYINSPVRDLNGVCEDSREQNPEWPMDADANGAYHIALKGQLLLNHLKESKDLKLQNGISNQDWLAYIQELRN
APAPAPAPAPAPAPAPA
MVSKGEEDNMAIIKEFMRFKVHMEGSVNGHEFEIEGEGEGRPYEGTQTAKLKVTKGGPLPFAWDILSPQFMYGSKA
YVKHPADIPDYLKLSFPEGFKWERVMNFEDGGVVTVTQDSSLQDGEFIYKVKLRGTNFPSDGPVMQKKTMGWEASS
ERMYPEDGALKGEIKQRLKLKDGGHYDAEVKTTYKAKKPVQLPGAYNVNIKLDITSHNEDYTIVEQYERAEGRHST
GGMDELYK
SEQ ID NO: 153
MTQFEGFTNLYQVSKTLRFELIPQGKILKHIQEQGFIEEDKARNDHYKELKPIIDRIYKTYADQCLQLVQLDWENLS
AAIDSYRKEKTEETRNALIEEQATYRNAIHDYFIGRIDNLTDAINKRHAEIYKGLFKAELENGKVLKQLGTVITTEH
ENALLRSEDKETTYFSGEYENRKNVESAEDISTAIPHRIVQDNFPKEKENCHIFTRLITAVPSLREHFENVKKAIGI
FVSTSIEEVESFPFYNQLLTQTQIDLYNQLLGGISREAGTEKIKGLNEVLNLAIQKNDETAHIIASLPHRFIPLEKQ
ILSDRNTLSFILEEEKSDEEVIQSECKYKILLRNENVLETAEALFNELNSIDLTHIFISHKKLETISSALCDHWDTL
RNALYERRISELTGKITKSAKEKVQRSLKHEDINLQEIISAAGKELSEAFKQKTSEILSHAHAALDQPLPTTLKKQE
EKEILKSQLDSLLGLYHLLDWFAVDESNEVDPEFSARLIGIKLEMEPSLSFYNKARNYATKKPYSVEKFKLNFQMPT
LASGWDVNKEKNNGAILFVKNGLYYLGIMPKQKGRYKALSFEPTEKTSEGFDKMYYDYFPDAAKMIPKCSTQLKAVT
AHFQTHTTPILLSNNFIEPLEITKEIYDLNNPEKEPKKFQTAYAKKTGDQKGYREALCKWIDETRDELSKYTKITSI
DLSSLRPSSQYKDLGEYYAELNPLLYHISFQRIAEKEIMDAVETGKLYLFQIYNKDFAKGHHGKPNLHTLYWTGLFS
PENLAKTSIKLNGQAELFYRPKSRMKRMAHRLGEKMLNKKLKDQKTPIPDTLYQELYDYVNHRLSHDLSDEARALLP
NVITKEVSHEIIKDRRFTSDKEFFHVPITLNYQAANSPSKENQRVNAYLKEHPETPIIGIDRGERNLIYITVIDSTG
KILEQRSLNTIQQFDYQKKLDNREKERVAARQAWSVVGTIKDLKQGYLSQVIHEIVDLMIHYQAVVVLENLNEGEKS
KRTGIAEKAVYQQFEKMLIDKLNCLVLKDYPAEKVGGVLNPYQLTDQFTSFAKMGTQSGELFYVPAPYTSKIDPLIG
FVDPFVWKTIKNHESRKHFLEGFDFLHYDVKTGDFILHFKMNRNLSFQRGLPGEMPAWDIVFEKNETQFDAKGTPFI
AGKRIVPVIENHRFTGRYRDLYPANELIALLEEKGIVERDGSNILPKLLENDDSHAIDTMVALIRSVLQMRNSNAAT
GEDYINSPVRDLNGVCEDSREQNPEWPMDADANGAYHIALKGQLLLNHLKESKDLKLQNGISNQDWLAYIQELRN
APAPAPAPAPAPAPAPAPA
MVSKGEEDNMAIIKEFMRFKVHMEGSVNGHEFEIEGEGEGRPYEGTQTAKLKVTKGGPLPFAWDILSPQFMYGSKA
YVKHPADIPDYLKLSFPEGFKWERVMNFEDGGVVTVTQDSSLQDGEFIYKVKLRGTNFPSDGPVMQKKTMGWEASS
ERMYPEDGALKGEIKQRLKLKDGGHYDAEVKTTYKAKKPVQLPGAYNVNIKLDITSHNEDYTIVEQYERAEGRHST
GGMDELYK
SEQ ID NO: 154
MTQFEGFTNLYQVSKTLRFELIPQGKILKHIQEQGFIEEDKARNDHYKELKPIIDRIYKTYADQCLQLVQLDWENLS
AAIDSYRKEKTEETRNALIEEQATYRNAIHDYFIGRIDNLTDAINKRHAEIYKGLFKAELENGKVLKQLGTVITTEH
ENALLRSEDKETTYFSGEYENRKNVESAEDISTAIPHRIVQDNFPKEKENCHIFTRLITAVPSLREHFENVKKAIGI
FVSTSIEEVESFPFYNQLLTQTQIDLYNQLLGGISREAGTEKIKGLNEVLNLAIQKNDETAHIIASLPHRFIPLEKQ
ILSDRNTLSFILEEEKSDEEVIQSECKYKILLRNENVLETAEALFNELNSIDLTHIFISHKKLETISSALCDHWDTL
RNALYERRISELTGKITKSAKEKVQRSLKHEDINLQEIISAAGKELSEAFKQKTSEILSHAHAALDQPLPTTLKKQE
EKEILKSQLDSLLGLYHLLDWFAVDESNEVDPEFSARLIGIKLEMEPSLSFYNKARNYATKKPYSVEKFKLNFQMPT
LASGWDVNKEKNNGAILFVKNGLYYLGIMPKQKGRYKALSFEPTEKTSEGFDKMYYDYFPDAAKMIPKCSTQLKAVT
AHFQTHTTPILLSNNFIEPLEITKEIYDLNNPEKEPKKFQTAYAKKTGDQKGYREALCKWIDETRDELSKYTKITSI
DLSSLRPSSQYKDLGEYYAELNPLLYHISFQRIAEKEIMDAVETGKLYLFQIYNKDFAKGHHGKPNLHTLYWTGLFS
PENLAKTSIKLNGQAELFYRPKSRMKRMAHRLGEKMLNKKLKDQKTPIPDTLYQELYDYVNHRLSHDLSDEARALLP
NVITKEVSHEIIKDRRFTSDKEFFHVPITLNYQAANSPSKENQRVNAYLKEHPETPIIGIDRGERNLIYITVIDSTG
KILEQRSLNTIQQFDYQKKLDNREKERVAARQAWSVVGTIKDLKQGYLSQVIHEIVDLMIHYQAVVVLENLNEGEKS
KRTGIAEKAVYQQFEKMLIDKLNCLVLKDYPAEKVGGVLNPYQLTDQFTSFAKMGTQSGELFYVPAPYTSKIDPLIG
FVDPFVWKTIKNHESRKHFLEGFDFLHYDVKTGDFILHFKMNRNLSFQRGLPGEMPAWDIVFEKNETQFDAKGTPFI
AGKRIVPVIENHRFTGRYRDLYPANELIALLEEKGIVERDGSNILPKLLENDDSHAIDTMVALIRSVLQMRNSNAAT
GEDYINSPVRDLNGVCEDSREQNPEWPMDADANGAYHIALKGQLLLNHLKESKDLKLQNGISNQDWLAYIQELRN
APAPAPAPAPAPAPAPAPAPA
MVSKGEEDNMAIIKEFMRFKVHMEGSVNGHEFEIEGEGEGRPYEGTQTAKLKVTKGGPLPFAWDILSPQFMYGSKA
YVKHPADIPDYLKLSFPEGFKWERVMNFEDGGVVTVTQDSSLQDGEFIYKVKLRGTNFPSDGPVMQKKTMGWEASS
ERMYPEDGALKGEIKQRLKLKDGGHYDAEVKTTYKAKKPVQLPGAYNVNIKLDITSHNEDYTIVEQYERAEGRHST
GGMDELYK
SEQ ID NO: 155
MTQFEGFTNLYQVSKTLRFELIPQGKILKHIQEQGFIEEDKARNDHYKELKPIIDRIYKTYADQCLQLVQLDWENLS
AAIDSYRKEKTEETRNALIEEQATYRNAIHDYFIGRIDNLTDAINKRHAEIYKGLFKAELENGKVLKQLGTVITTEH
ENALLRSEDKETTYFSGEYENRKNVESAEDISTAIPHRIVQDNFPKEKENCHIFTRLITAVPSLREHFENVKKAIGI
FVSTSIEEVESFPFYNQLLTQTQIDLYNQLLGGISREAGTEKIKGLNEVLNLAIQKNDETAHIIASLPHRFIPLEKQ
ILSDRNTLSFILEEEKSDEEVIQSECKYKILLRNENVLETAEALFNELNSIDLTHIFISHKKLETISSALCDHWDTL
RNALYERRISELTGKITKSAKEKVQRSLKHEDINLQEIISAAGKELSEAFKQKTSEILSHAHAALDQPLPTTLKKQE
EKEILKSQLDSLLGLYHLLDWFAVDESNEVDPEFSARLIGIKLEMEPSLSFYNKARNYATKKPYSVEKFKLNFQMPT
LASGWDVNKEKNNGAILFVKNGLYYLGIMPKQKGRYKALSFEPTEKTSEGFDKMYYDYFPDAAKMIPKCSTQLKAVT
AHFQTHTTPILLSNNFIEPLEITKEIYDLNNPEKEPKKFQTAYAKKTGDQKGYREALCKWIDETRDELSKYTKITSI
DLSSLRPSSQYKDLGEYYAELNPLLYHISFQRIAEKEIMDAVETGKLYLFQIYNKDFAKGHHGKPNLHTLYWTGLFS
PENLAKTSIKLNGQAELFYRPKSRMKRMAHRLGEKMLNKKLKDQKTPIPDTLYQELYDYVNHRLSHDLSDEARALLP
NVITKEVSHEIIKDRRFTSDKEFFHVPITLNYQAANSPSKENQRVNAYLKEHPETPIIGIDRGERNLIYITVIDSTG
KILEQRSLNTIQQFDYQKKLDNREKERVAARQAWSVVGTIKDLKQGYLSQVIHEIVDLMIHYQAVVVLENLNEGEKS
KRTGIAEKAVYQQFEKMLIDKLNCLVLKDYPAEKVGGVLNPYQLTDQFTSFAKMGTQSGELFYVPAPYTSKIDPLIG
FVDPFVWKTIKNHESRKHFLEGFDFLHYDVKTGDFILHFKMNRNLSFQRGLPGEMPAWDIVFEKNETQFDAKGTPFI
AGKRIVPVIENHRFTGRYRDLYPANELIALLEEKGIVERDGSNILPKLLENDDSHAIDTMVALIRSVLQMRNSNAAT
GEDYINSPVRDLNGVCEDSREQNPEWPMDADANGAYHIALKGQLLLNHLKESKDLKLQNGISNQDWLAYIQELRN
APAPAPAPAPAPAPAPAPAPAPA
MVSKGEEDNMAIIKEFMRFKVHMEGSVNGHEFEIEGEGEGRPYEGTQTAKLKVTKGGPLPFAWDILSPQFMYGSKA
YVKHPADIPDYLKLSFPEGFKWERVMNFEDGGVVTVTQDSSLQDGEFIYKVKLRGTNFPSDGPVMQKKTMGWEASS
ERMYPEDGALKGEIKQRLKLKDGGHYDAEVKTTYKAKKPVQLPGAYNVNIKLDITSHNEDYTIVEQYERAEGRHST
GGMDELYK
SEQ ID NO: 156
MTQFEGFTNLYQVSKTLRFELIPQGKILKHIQEQGFIEEDKARNDHYKELKPIIDRIYKTYADQCLQLVQLDWENLS
AAIDSYRKEKTEETRNALIEEQATYRNAIHDYFIGRIDNLTDAINKRHAEIYKGLFKAELENGKVLKQLGTVITTEH
ENALLRSEDKETTYFSGEYENRKNVESAEDISTAIPHRIVQDNFPKEKENCHIFTRLITAVPSLREHFENVKKAIGI
FVSTSIEEVESFPFYNQLLTQTQIDLYNQLLGGISREAGTEKIKGLNEVLNLAIQKNDETAHIIASLPHRFIPLEKQ
ILSDRNTLSFILEEEKSDEEVIQSECKYKILLRNENVLETAEALFNELNSIDLTHIFISHKKLETISSALCDHWDTL
RNALYERRISELTGKITKSAKEKVQRSLKHEDINLQEIISAAGKELSEAFKQKTSEILSHAHAALDQPLPTTLKKQE
EKEILKSQLDSLLGLYHLLDWFAVDESNEVDPEFSARLIGIKLEMEPSLSFYNKARNYATKKPYSVEKFKLNFQMPT
LASGWDVNKEKNNGAILFVKNGLYYLGIMPKQKGRYKALSFEPTEKTSEGFDKMYYDYFPDAAKMIPKCSTQLKAVT
AHFQTHTTPILLSNNFIEPLEITKEIYDLNNPEKEPKKFQTAYAKKTGDQKGYREALCKWIDETRDELSKYTKITSI
DLSSLRPSSQYKDLGEYYAELNPLLYHISFQRIAEKEIMDAVETGKLYLFQIYNKDFAKGHHGKPNLHTLYWTGLFS
PENLAKTSIKLNGQAELFYRPKSRMKRMAHRLGEKMLNKKLKDQKTPIPDTLYQELYDYVNHRLSHDLSDEARALLP
NVITKEVSHEIIKDRRFTSDKEFFHVPITLNYQAANSPSKENQRVNAYLKEHPETPIIGIDRGERNLIYITVIDSTG
KILEQRSLNTIQQFDYQKKLDNREKERVAARQAWSVVGTIKDLKQGYLSQVIHEIVDLMIHYQAVVVLENLNEGEKS
KRTGIAEKAVYQQFEKMLIDKLNCLVLKDYPAEKVGGVLNPYQLTDQFTSFAKMGTQSGELFYVPAPYTSKIDPLIG
FVDPFVWKTIKNHESRKHFLEGFDFLHYDVKTGDFILHFKMNRNLSFQRGLPGEMPAWDIVFEKNETQFDAKGTPFI
AGKRIVPVIENHRFTGRYRDLYPANELIALLEEKGIVERDGSNILPKLLENDDSHAIDTMVALIRSVLQMRNSNAAT
GEDYINSPVRDLNGVCEDSREQNPEWPMDADANGAYHIALKGQLLLNHLKESKDLKLQNGISNQDWLAYIQELRN
APAPAPAPAPAPAPAPAPAPAPAPA
MVSKGEEDNMAIIKEFMRFKVHMEGSVNGHEFEIEGEGEGRPYEGTQTAKLKVTKGGPLPFAWDILSPQFMYGSKA
YVKHPADIPDYLKLSFPEGFKWERVMNFEDGGVVTVTQDSSLQDGEFIYKVKLRGTNFPSDGPVMQKKTMGWEASS
ERMYPEDGALKGEIKQRLKLKDGGHYDAEVKTTYKAKKPVQLPGAYNVNIKLDITSHNEDYTIVEQYERAEGRHST
GGMDELYK
SEQ ID NO: 157
MTQFEGFTNLYQVSKTLRFELIPQGKILKHIQEQGFIEEDKARNDHYKELKPIIDRIYKTYADQCLQLVQLDWENLS
AAIDSYRKEKTEETRNALIEEQATYRNAIHDYFIGRIDNLTDAINKRHAEIYKGLFKAELENGKVLKQLGTVITTEH
ENALLRSEDKETTYFSGEYENRKNVESAEDISTAIPHRIVQDNFPKEKENCHIFTRLITAVPSLREHFENVKKAIGI
FVSTSIEEVESFPFYNQLLTQTQIDLYNQLLGGISREAGTEKIKGLNEVLNLAIQKNDETAHIIASLPHRFIPLEKQ
ILSDRNTLSFILEEEKSDEEVIQSECKYKILLRNENVLETAEALFNELNSIDLTHIFISHKKLETISSALCDHWDTL
RNALYERRISELTGKITKSAKEKVQRSLKHEDINLQEIISAAGKELSEAFKQKTSEILSHAHAALDQPLPTTLKKQE
EKEILKSQLDSLLGLYHLLDWFAVDESNEVDPEFSARLIGIKLEMEPSLSFYNKARNYATKKPYSVEKFKLNFQMPT
LASGWDVNKEKNNGAILFVKNGLYYLGIMPKQKGRYKALSFEPTEKTSEGFDKMYYDYFPDAAKMIPKCSTQLKAVT
AHFQTHTTPILLSNNFIEPLEITKEIYDLNNPEKEPKKFQTAYAKKTGDQKGYREALCKWIDETRDELSKYTKITSI
DLSSLRPSSQYKDLGEYYAELNPLLYHISFQRIAEKEIMDAVETGKLYLFQIYNKDFAKGHHGKPNLHTLYWTGLFS
PENLAKTSIKLNGQAELFYRPKSRMKRMAHRLGEKMLNKKLKDQKTPIPDTLYQELYDYVNHRLSHDLSDEARALLP
NVITKEVSHEIIKDRRFTSDKEFFHVPITLNYQAANSPSKENQRVNAYLKEHPETPIIGIDRGERNLIYITVIDSTG
KILEQRSLNTIQQFDYQKKLDNREKERVAARQAWSVVGTIKDLKQGYLSQVIHEIVDLMIHYQAVVVLENLNEGEKS
KRTGIAEKAVYQQFEKMLIDKLNCLVLKDYPAEKVGGVLNPYQLTDQFTSFAKMGTQSGELFYVPAPYTSKIDPLIG
FVDPFVWKTIKNHESRKHFLEGFDFLHYDVKTGDFILHFKMNRNLSFQRGLPGEMPAWDIVFEKNETQFDAKGTPFI
AGKRIVPVIENHRFTGRYRDLYPANELIALLEEKGIVERDGSNILPKLLENDDSHAIDTMVALIRSVLQMRNSNAAT
GEDYINSPVRDLNGVCEDSREQNPEWPMDADANGAYHIALKGQLLLNHLKESKDLKLQNGISNQDWLAYIQELRN
APAPAPAPAPAPAPAPAPAPAPAPAPA
MVSKGEEDNMAIIKEFMRFKVHMEGSVNGHEFEIEGEGEGRPYEGTQTAKLKVTKGGPLPFAWDILSPQFMYGSKA
YVKHPADIPDYLKLSFPEGFKWERVMNFEDGGVVTVTQDSSLQDGEFIYKVKLRGTNFPSDGPVMQKKTMGWEASS
ERMYPEDGALKGEIKQRLKLKDGGHYDAEVKTTYKAKKPVQLPGAYNVNIKLDITSHNEDYTIVEQYERAEGRHST
GGMDELYK
SEQ ID NO: 158
MTQFEGFTNLYQVSKTLRFELIPQGKILKHIQEQGFIEEDKARNDHYKELKPIIDRIYKTYADQCLQLVQLDWENLS
AAIDSYRKEKTEETRNALIEEQATYRNAIHDYFIGRIDNLTDAINKRHAEIYKGLFKAELENGKVLKQLGTVITTEH
ENALLRSEDKETTYFSGEYENRKNVESAEDISTAIPHRIVQDNFPKEKENCHIFTRLITAVPSLREHFENVKKAIGI
FVSTSIEEVESFPFYNQLLTQTQIDLYNQLLGGISREAGTEKIKGLNEVLNLAIQKNDETAHIIASLPHRFIPLEKQ
ILSDRNTLSFILEEEKSDEEVIQSECKYKILLRNENVLETAEALFNELNSIDLTHIFISHKKLETISSALCDHWDTL
RNALYERRISELTGKITKSAKEKVQRSLKHEDINLQEIISAAGKELSEAFKQKTSEILSHAHAALDQPLPTTLKKQE
EKEILKSQLDSLLGLYHLLDWFAVDESNEVDPEFSARLIGIKLEMEPSLSFYNKARNYATKKPYSVEKFKLNFQMPT
LASGWDVNKEKNNGAILFVKNGLYYLGIMPKQKGRYKALSFEPTEKTSEGFDKMYYDYFPDAAKMIPKCSTQLKAVT
AHFQTHTTPILLSNNFIEPLEITKEIYDLNNPEKEPKKFQTAYAKKTGDQKGYREALCKWIDETRDELSKYTKITSI
DLSSLRPSSQYKDLGEYYAELNPLLYHISFQRIAEKEIMDAVETGKLYLFQIYNKDFAKGHHGKPNLHTLYWTGLFS
PENLAKTSIKLNGQAELFYRPKSRMKRMAHRLGEKMLNKKLKDQKTPIPDTLYQELYDYVNHRLSHDLSDEARALLP
NVITKEVSHEIIKDRRFTSDKEFFHVPITLNYQAANSPSKENQRVNAYLKEHPETPIIGIDRGERNLIYITVIDSTG
KILEQRSLNTIQQFDYQKKLDNREKERVAARQAWSVVGTIKDLKQGYLSQVIHEIVDLMIHYQAVVVLENLNEGEKS
KRTGIAEKAVYQQFEKMLIDKLNCLVLKDYPAEKVGGVLNPYQLTDQFTSFAKMGTQSGELFYVPAPYTSKIDPLIG
FVDPFVWKTIKNHESRKHFLEGFDFLHYDVKTGDFILHFKMNRNLSFQRGLPGEMPAWDIVFEKNETQFDAKGTPFI
AGKRIVPVIENHRFTGRYRDLYPANELIALLEEKGIVFRDGSNILPKLLENDDSHAIDTMVALIRSVLQMRNSNAAT
GEDYINSPVRDLNGVCEDSREQNPEWPMDADANGAYHIALKGQLLLNHLKESKDLKLQNGISNQDWLAYIQELRN
APAPAPAPAPAPAPAPAPAPAPAPAPAPA
MVSKGEEDNMAIIKEFMRFKVHMEGSVNGHEFEIEGEGEGRPYEGTQTAKLKVTKGGPLPFAWDILSPQFMYGSKA
YVKHPADIPDYLKLSFPEGFKWERVMNFEDGGVVTVTQDSSLQDGEFIYKVKLRGTNFPSDGPVMQKKTMGWEASS
ERMYPEDGALKGEIKQRLKLKDGGHYDAEVKTTYKAKKPVQLPGAYNVNIKLDITSHNEDYTIVEQYERAEGRHST
GGMDELYK
SEQ ID NO: 159
MTQFEGFTNLYQVSKTLRFELIPQGKTLKHIQEQGFIEEDKARNDHYKELKPIIDRIYKTYADQCLQLVQLDWENLS
AAIDSYRKEKTEETRNALIEEQATYRNAIHDYFIGRIDNLTDAINKRHAEIYKGLFKAELENGKVLKQLGTVITTEH
ENALLRSFDKETTYFSGEYENRKNVESAEDISTAIPHRIVQDNFPKEKENCHIFTRLITAVPSLREHFENVKKAIGI
FVSTSIEEVFSFPFYNQLLTQTQIDLYNQLLGGISREAGTEKIKGLNEVLNLAIQKNDETAHIIASLPHRFIPLFKQ
ILSDRNTLSFILEEFKSDEEVIQSFCKYKILLRNENVLETAEALFNELNSIDLTHIFISHKKLETISSALCDHWDTL
RNALYERRISELTGKITKSAKEKVQRSLKHEDINLQEIISAAGKELSEAFKQKTSEILSHAHAALDQPLPTTLKKQE
EKEILKSQLDSLLGLYHLLDWFAVDESNEVDPEFSARLTGIKLEMEPSLSFYNKARNYATKKPYSVEKFKLNFQMPT
LASGWDVNKEKNNGAILFVKNGLYYLGIMPKQKGRYKALSFEPTEKTSEGFDKMYYDYFPDAAKMIPKCSTQLKAVT
AHFQTHTTPILLSNNFIEPLEITKEIYDLNNPEKEPKKFQTAYAKKTGDQKGYREALCKWIDETRDELSKYTKTTSI
DLSSLRPSSQYKDLGEYYAELNPLLYHISFQRIAEKEIMDAVETGKLYLFQIYNKDFAKGHHGKPNLHTLYWTGLFS
PENLAKTSIKLNGQAELFYRPKSRMKRMAHRLGEKMLNKKLKDQKTPIPDTLYQELYDYVNHRLSHDLSDEARALLP
NVITKEVSHEIIKDRRFTSDKEFFHVPITLNYQAANSPSKFNQRVNAYLKEHPETPIIGIDRGERNLIYITVIDSTG
KILEQRSLNTIQQFDYQKKLDNREKERVAARQAWSVVGTIKDLKQGYLSQVIHEIVDLMIHYQAVVVLENLNEGEKS
KRTGIAEKAVYQQFEKMLIDKLNCLVLKDYPAEKVGGVLNPYQLTDQFTSFAKMGTQSGELFYVPAPYTSKIDPLTG
FVDPFVWKTIKNHESRKHFLEGFDFLHYDVKTGDFILHFKMNRNLSFQRGLPGEMPAWDIVFEKNETQFDAKGTPFI
AGKRIVPVIENHRFTGRYRDLYPANELIALLEEKGIVFRDGSNILPKLLENDDSHAIDTMVALIRSVLQMRNSNAAT
GEDYINSPVRDLNGVCEDSREQNPEWPMDADANGAYHIALKGQLLLNHLKESKDLKLQNGISNQDWLAYIQELRN
XP
MVSKGEEDNMAIIKEFMRFKVHMEGSVNGHEFEIEGEGEGRPYEGTQTAKLKVTKGGPLPFAWDILSPQFMYGSKA
YVKHPADIPDYLKLSFPEGFKWERVMNFEDGGVVTVTQDSSLQDGEFIYKVKLRGTNFPSDGPVMQKKTMGWEASS
ERMYPEDGALKGEIKQRLKLKDGGHYDAEVKTTYKAKKPVQLPGAYNVNIKLDITSHNEDYTIVEQYERAEGRHST
GGMDELYK
SEQ ID NO: 160
MTQFEGFTNLYQVSKTLRFELIPQGKTLKHIQEQGFIEEDKARNDHYKELKPIIDRIYKTYADQCLQLVQLDWENLS
AAIDSYRKEKTEETRNALIEEQATYRNAIHDYFIGRIDNLTDAINKRHAEIYKGLFKAELENGKVLKQLGTVITTEH
ENALLRSFDKETTYFSGEYENRKNVESAEDISTAIPHRIVQDNFPKEKENCHIFTRLITAVPSLREHFENVKKAIGI
FVSTSIEEVFSFPFYNQLLTQTQIDLYNQLLGGISREAGTEKIKGLNEVLNLAIQKNDETAHIIASLPHRFIPLFKQ
ILSDRNTLSFILEEFKSDEEVIQSFCKYKILLRNENVLETAEALFNELNSIDLTHIFISHKKLETISSALCDHWDTL
RNALYERRISELTGKITKSAKEKVQRSLKHEDINLQEIISAAGKELSEAFKQKTSEILSHAHAALDQPLPTTLKKQE
EKEILKSQLDSLLGLYHLLDWFAVDESNEVDPEFSARLTGIKLEMEPSLSFYNKARNYATKKPYSVEKFKLNFQMPT
LASGWDVNKEKNNGAILFVKNGLYYLGIMPKQKGRYKALSFEPTEKTSEGFDKMYYDYFPDAAKMIPKCSTQLKAVT
AHFQTHTTPILLSNNFIEPLEITKEIYDLNNPEKEPKKFQTAYAKKTGDQKGYREALCKWIDETRDELSKYTKTTSI
DLSSLRPSSQYKDLGEYYAELNPLLYHISFQRIAEKEIMDAVETGKLYLFQIYNKDFAKGHHGKPNLHTLYWTGLFS
PENLAKTSIKLNGQAELFYRPKSRMKRMAHRLGEKMLNKKLKDQKTPIPDTLYQELYDYVNHRLSHDLSDEARALLP
NVITKEVSHEIIKDRRFTSDKEFFHVPITLNYQAANSPSKFNQRVNAYLKEHPETPIIGIDRGERNLIYITVIDSTG
KILEQRSLNTIQQFDYQKKLDNREKERVAARQAWSVVGTIKDLKQGYLSQVIHEIVDLMIHYQAVVVLENLNEGEKS
KRTGIAEKAVYQQFEKMLIDKLNCLVLKDYPAEKVGGVLNPYQLTDQFTSFAKMGTQSGELFYVPAPYTSKIDPLTG
FVDPFVWKTIKNHESRKHFLEGFDFLHYDVKTGDFILHFKMNRNLSFQRGLPGEMPAWDIVFEKNETQFDAKGTPFI
AGKRIVPVIENHRFTGRYRDLYPANELIALLEEKGIVFRDGSNILPKLLENDDSHAIDTMVALIRSVLQMRNSNAAT
GEDYINSPVRDLNGVCEDSREQNPEWPMDADANGAYHIALKGQLLLNHLKESKDLKLQNGISNQDWLAYIQELRN
XPXP
MVSKGEEDNMAIIKEFMRFKVHMEGSVNGHEFEIEGEGEGRPYEGTQTAKLKVTKGGPLPFAWDILSPQFMYGSKA
YVKHPADIPDYLKLSFPEGFKWERVMNFEDGGVVTVTQDSSLQDGEFIYKVKLRGTNFPSDGPVMQKKTMGWEASS
ERMYPEDGALKGEIKQRLKLKDGGHYDAEVKTTYKAKKPVQLPGAYNVNIKLDITSHNEDYTIVEQYERAEGRHST
GGMDELYK
SEQ ID NO: 161
MTQFEGFTNLYQVSKTLRFELIPQGKILKHIQEQGFIEEDKARNDHYKELKPIIDRIYKTYADQCLQLVQLDWENLS
AAIDSYRKEKTEETRNALIEEQATYRNAIHDYFIGRIDNLTDAINKRHAEIYKGLFKAELENGKVLKQLGTVITTEH
ENALLRSEDKETTYFSGEYENRKNVESAEDISTAIPHRIVQDNFPKEKENCHIFTRLITAVPSLREHFENVKKAIGI
FVSTSIEEVESFPFYNQLLTQTQIDLYNQLLGGISREAGTEKIKGLNEVLNLAIQKNDETAHIIASLPHRFIPLEKQ
ILSDRNTLSFILEEEKSDEEVIQSECKYKILLRNENVLETAEALFNELNSIDLTHIFISHKKLETISSALCDHWDTL
RNALYERRISELTGKITKSAKEKVQRSLKHEDINLQEIISAAGKELSEAFKQKTSEILSHAHAALDQPLPTTLKKQE
EKEILKSQLDSLLGLYHLLDWFAVDESNEVDPEFSARLIGIKLEMEPSLSFYNKARNYATKKPYSVEKFKLNFQMPT
LASGWDVNKEKNNGAILFVKNGLYYLGIMPKQKGRYKALSFEPTEKTSEGFDKMYYDYFPDAAKMIPKCSTQLKAVT
AHFQTHTTPILLSNNFIEPLEITKEIYDLNNPEKEPKKFQTAYAKKTGDQKGYREALCKWIDETRDELSKYTKITSI
DLSSLRPSSQYKDLGEYYAELNPLLYHISFQRIAEKEIMDAVETGKLYLFQIYNKDFAKGHHGKPNLHTLYWTGLFS
PENLAKTSIKLNGQAELFYRPKSRMKRMAHRLGEKMLNKKLKDQKTPIPDTLYQELYDYVNHRLSHDLSDEARALLP
NVITKEVSHEIIKDRRFTSDKEFFHVPITLNYQAANSPSKENQRVNAYLKEHPETPIIGIDRGERNLIYITVIDSTG
KILEQRSLNTIQQFDYQKKLDNREKERVAARQAWSVVGTIKDLKQGYLSQVIHEIVDLMIHYQAVVVLENLNEGEKS
KRTGIAEKAVYQQFEKMLIDKLNCLVLKDYPAEKVGGVLNPYQLTDQFTSFAKMGTQSGELFYVPAPYTSKIDPLIG
FVDPFVWKTIKNHESRKHFLEGFDFLHYDVKTGDFILHFKMNRNLSFQRGLPGEMPAWDIVFEKNETQFDAKGTPFI
AGKRIVPVIENHRFTGRYRDLYPANELIALLEEKGIVERDGSNILPKLLENDDSHAIDTMVALIRSVLQMRNSNAAT
GEDYINSPVRDLNGVCEDSREQNPEWPMDADANGAYHIALKGQLLLNHLKESKDLKLQNGISNQDWLAYIQELRN
XPXPXP
MVSKGEEDNMAIIKEFMRFKVHMEGSVNGHEFEIEGEGEGRPYEGTQTAKLKVTKGGPLPFAWDILSPQFMYGSKA
YVKHPADIPDYLKLSFPEGFKWERVMNFEDGGVVTVTQDSSLQDGEFIYKVKLRGTNFPSDGPVMQKKTMGWEASS
ERMYPEDGALKGEIKQRLKLKDGGHYDAEVKTTYKAKKPVQLPGAYNVNIKLDITSHNEDYTIVEQYERAEGRHST
GGMDELYK
SEQ ID NO: 162
MTQFEGFTNLYQVSKTLRFELIPQGKILKHIQEQGFIEEDKARNDHYKELKPIIDRIYKTYADQCLQLVQLDWENLS
AAIDSYRKEKTEETRNALIEEQATYRNAIHDYFIGRIDNLTDAINKRHAEIYKGLFKAELENGKVLKQLGTVITTEH
ENALLRSEDKETTYFSGEYENRKNVESAEDISTAIPHRIVQDNFPKEKENCHIFTRLITAVPSLREHFENVKKAIGI
FVSTSIEEVESFPFYNQLLTQTQIDLYNQLLGGISREAGTEKIKGLNEVLNLAIQKNDETAHIIASLPHRFIPLEKQ
ILSDRNTLSFILEEEKSDEEVIQSECKYKILLRNENVLETAEALFNELNSIDLTHIFISHKKLETISSALCDHWDTL
RNALYERRISELTGKITKSAKEKVQRSLKHEDINLQEIISAAGKELSEAFKQKTSEILSHAHAALDQPLPTTLKKQE
EKEILKSQLDSLLGLYHLLDWFAVDESNEVDPEFSARLIGIKLEMEPSLSFYNKARNYATKKPYSVEKFKLNFQMPT
LASGWDVNKEKNNGAILFVKNGLYYLGIMPKQKGRYKALSFEPTEKTSEGFDKMYYDYFPDAAKMIPKCSTQLKAVT
AHFQTHTTPILLSNNFIEPLEITKEIYDLNNPEKEPKKFQTAYAKKTGDQKGYREALCKWIDETRDELSKYTKITSI
DLSSLRPSSQYKDLGEYYAELNPLLYHISFQRIAEKEIMDAVETGKLYLFQIYNKDFAKGHHGKPNLHTLYWTGLFS
PENLAKTSIKLNGQAELFYRPKSRMKRMAHRLGEKMLNKKLKDQKTPIPDTLYQELYDYVNHRLSHDLSDEARALLP
NVITKEVSHEIIKDRRFTSDKEFFHVPITLNYQAANSPSKENQRVNAYLKEHPETPIIGIDRGERNLIYITVIDSTG
KILEQRSLNTIQQFDYQKKLDNREKERVAARQAWSVVGTIKDLKQGYLSQVIHEIVDLMIHYQAVVVLENLNEGEKS
KRTGIAEKAVYQQFEKMLIDKLNCLVLKDYPAEKVGGVLNPYQLTDQFTSFAKMGTQSGELFYVPAPYTSKIDPLIG
FVDPFVWKTIKNHESRKHFLEGFDFLHYDVKTGDFILHFKMNRNLSFQRGLPGEMPAWDIVFEKNETQFDAKGTPFI
AGKRIVPVIENHRFTGRYRDLYPANELIALLEEKGIVERDGSNILPKLLENDDSHAIDTMVALIRSVLQMRNSNAAT
GEDYINSPVRDLNGVCEDSREQNPEWPMDADANGAYHIALKGQLLLNHLKESKDLKLQNGISNQDWLAYIQELRN
XPXPXPXP
MVSKGEEDNMAIIKEFMRFKVHMEGSVNGHEFEIEGEGEGRPYEGTQTAKLKVTKGGPLPFAWDILSPQFMYGSKA
YVKHPADIPDYLKLSFPEGFKWERVMNFEDGGVVTVTQDSSLQDGEFIYKVKLRGTNFPSDGPVMQKKTMGWEASS
ERMYPEDGALKGEIKQRLKLKDGGHYDAEVKTTYKAKKPVQLPGAYNVNIKLDITSHNEDYTIVEQYERAEGRHST
GGMDELYK
SEQ ID NO: 163
MTQFEGFTNLYQVSKTLRFELIPQGKILKHIQEQGFIEEDKARNDHYKELKPIIDRIYKTYADQCLQLVQLDWENLS
AAIDSYRKEKTEETRNALIEEQATYRNAIHDYFIGRIDNLTDAINKRHAEIYKGLFKAELENGKVLKQLGTVITTEH
ENALLRSEDKETTYFSGEYENRKNVESAEDISTAIPHRIVQDNFPKEKENCHIFTRLITAVPSLREHFENVKKAIGI
FVSTSIEEVESFPFYNQLLTQTQIDLYNQLLGGISREAGTEKIKGLNEVLNLAIQKNDETAHIIASLPHRFIPLEKQ
ILSDRNTLSFILEEEKSDEEVIQSECKYKILLRNENVLETAEALFNELNSIDLTHIFISHKKLETISSALCDHWDTL
RNALYERRISELTGKITKSAKEKVQRSLKHEDINLQEIISAAGKELSEAFKQKTSEILSHAHAALDQPLPTTLKKQE
EKEILKSQLDSLLGLYHLLDWFAVDESNEVDPEFSARLIGIKLEMEPSLSFYNKARNYATKKPYSVEKFKLNFQMPT
LASGWDVNKEKNNGAILFVKNGLYYLGIMPKQKGRYKALSFEPTEKTSEGFDKMYYDYFPDAAKMIPKCSTQLKAVT
AHFQTHTTPILLSNNFIEPLEITKEIYDLNNPEKEPKKFQTAYAKKTGDQKGYREALCKWIDETRDELSKYTKITSI
DLSSLRPSSQYKDLGEYYAELNPLLYHISFQRIAEKEIMDAVETGKLYLFQIYNKDFAKGHHGKPNLHTLYWTGLFS
PENLAKTSIKLNGQAELFYRPKSRMKRMAHRLGEKMLNKKLKDQKTPIPDTLYQELYDYVNHRLSHDLSDEARALLP
NVITKEVSHEIIKDRRFTSDKEFFHVPITLNYQAANSPSKENQRVNAYLKEHPETPIIGIDRGERNLIYITVIDSTG
KILEQRSLNTIQQFDYQKKLDNREKERVAARQAWSVVGTIKDLKQGYLSQVIHEIVDLMIHYQAVVVLENLNEGEKS
KRTGIAEKAVYQQFEKMLIDKLNCLVLKDYPAEKVGGVLNPYQLTDQFTSFAKMGTQSGELFYVPAPYTSKIDPLIG
FVDPFVWKTIKNHESRKHFLEGFDFLHYDVKTGDFILHFKMNRNLSFQRGLPGEMPAWDIVFEKNETQFDAKGTPFI
AGKRIVPVIENHRFTGRYRDLYPANELIALLEEKGIVERDGSNILPKLLENDDSHAIDTMVALIRSVLQMRNSNAAT
GEDYINSPVRDLNGVCEDSREQNPEWPMDADANGAYHIALKGQLLLNHLKESKDLKLQNGISNQDWLAYIQELRN
XPXPXPXPXP
MVSKGEEDNMAIIKEFMRFKVHMEGSVNGHEFEIEGEGEGRPYEGTQTAKLKVTKGGPLPFAWDILSPQFMYGSKA
YVKHPADIPDYLKLSFPEGFKWERVMNFEDGGVVTVTQDSSLQDGEFIYKVKLRGTNFPSDGPVMQKKTMGWEASS
ERMYPEDGALKGEIKQRLKLKDGGHYDAEVKTTYKAKKPVQLPGAYNVNIKLDITSHNEDYTIVEQYERAEGRHST
GGMDELYK
SEQ ID NO: 164
MTQFEGFTNLYQVSKTLRFELIPQGKILKHIQEQGFIEEDKARNDHYKELKPIIDRIYKTYADQCLQLVQLDWENLS
AAIDSYRKEKTEETRNALIEEQATYRNAIHDYFIGRIDNLTDAINKRHAEIYKGLFKAELENGKVLKQLGTVITTEH
ENALLRSEDKETTYFSGEYENRKNVESAEDISTAIPHRIVQDNFPKEKENCHIFTRLITAVPSLREHFENVKKAIGI
FVSTSIEEVESFPFYNQLLTQTQIDLYNQLLGGISREAGTEKIKGLNEVLNLAIQKNDETAHIIASLPHRFIPLEKQ
ILSDRNTLSFILEEEKSDEEVIQSECKYKILLRNENVLETAEALFNELNSIDLTHIFISHKKLETISSALCDHWDTL
RNALYERRISELTGKITKSAKEKVQRSLKHEDINLQEIISAAGKELSEAFKQKTSEILSHAHAALDQPLPTTLKKQE
EKEILKSQLDSLLGLYHLLDWFAVDESNEVDPEFSARLIGIKLEMEPSLSFYNKARNYATKKPYSVEKFKLNFQMPT
LASGWDVNKEKNNGAILFVKNGLYYLGIMPKQKGRYKALSFEPTEKTSEGFDKMYYDYFPDAAKMIPKCSTQLKAVT
AHFQTHTTPILLSNNFIEPLEITKEIYDLNNPEKEPKKFQTAYAKKTGDQKGYREALCKWIDETRDELSKYTKITSI
DLSSLRPSSQYKDLGEYYAELNPLLYHISFQRIAEKEIMDAVETGKLYLFQIYNKDFAKGHHGKPNLHTLYWTGLFS
PENLAKTSIKLNGQAELFYRPKSRMKRMAHRLGEKMLNKKLKDQKTPIPDTLYQELYDYVNHRLSHDLSDEARALLP
NVITKEVSHEIIKDRRFTSDKEFFHVPITLNYQAANSPSKENQRVNAYLKEHPETPIIGIDRGERNLIYITVIDSTG
KILEQRSLNTIQQFDYQKKLDNREKERVAARQAWSVVGTIKDLKQGYLSQVIHEIVDLMIHYQAVVVLENLNEGEKS
KRTGIAEKAVYQQFEKMLIDKLNCLVLKDYPAEKVGGVLNPYQLTDQFTSFAKMGTQSGELFYVPAPYTSKIDPLIG
FVDPFVWKTIKNHESRKHFLEGFDFLHYDVKTGDFILHFKMNRNLSFQRGLPGEMPAWDIVFEKNETQFDAKGTPFI
AGKRIVPVIENHRFTGRYRDLYPANELIALLEEKGIVERDGSNILPKLLENDDSHAIDTMVALIRSVLQMRNSNAAT
GEDYINSPVRDLNGVCEDSREQNPEWPMDADANGAYHIALKGQLLLNHLKESKDLKLQNGISNQDWLAYIQELRN
XPXPXPXPXPXP
MVSKGEEDNMAIIKEFMRFKVHMEGSVNGHEFEIEGEGEGRPYEGTQTAKLKVTKGGPLPFAWDILSPQFMYGSKA
YVKHPADIPDYLKLSFPEGFKWERVMNFEDGGVVTVTQDSSLQDGEFIYKVKLRGTNFPSDGPVMQKKTMGWEASS
ERMYPEDGALKGEIKQRLKLKDGGHYDAEVKTTYKAKKPVQLPGAYNVNIKLDITSHNEDYTIVEQYERAEGRHST
GGMDELYK
SEQ ID NO: 165
MTQFEGFTNLYQVSKTLRFELIPQGKILKHIQEQGFIEEDKARNDHYKELKPIIDRIYKTYADQCLQLVQLDWENLS
AAIDSYRKEKTEETRNALIEEQATYRNAIHDYFIGRIDNLTDAINKRHAEIYKGLFKAELENGKVLKQLGTVITTEH
ENALLRSEDKETTYFSGEYENRKNVESAEDISTAIPHRIVQDNFPKEKENCHIFTRLITAVPSLREHFENVKKAIGI
FVSTSIEEVESFPFYNQLLTQTQIDLYNQLLGGISREAGTEKIKGLNEVLNLAIQKNDETAHIIASLPHRFIPLEKQ
ILSDRNTLSFILEEEKSDEEVIQSECKYKILLRNENVLETAEALFNELNSIDLTHIFISHKKLETISSALCDHWDTL
RNALYERRISELTGKITKSAKEKVQRSLKHEDINLQEIISAAGKELSEAFKQKTSEILSHAHAALDQPLPTTLKKQE
EKEILKSQLDSLLGLYHLLDWFAVDESNEVDPEFSARLIGIKLEMEPSLSFYNKARNYATKKPYSVEKFKLNFQMPT
LASGWDVNKEKNNGAILFVKNGLYYLGIMPKQKGRYKALSFEPTEKTSEGFDKMYYDYFPDAAKMIPKCSTQLKAVT
AHFQTHTTPILLSNNFIEPLEITKEIYDLNNPEKEPKKFQTAYAKKTGDQKGYREALCKWIDETRDELSKYTKITSI
DLSSLRPSSQYKDLGEYYAELNPLLYHISFQRIAEKEIMDAVETGKLYLFQIYNKDFAKGHHGKPNLHTLYWTGLFS
PENLAKTSIKLNGQAELFYRPKSRMKRMAHRLGEKMLNKKLKDQKTPIPDTLYQELYDYVNHRLSHDLSDEARALLP
NVITKEVSHEIIKDRRFTSDKEFFHVPITLNYQAANSPSKENQRVNAYLKEHPETPIIGIDRGERNLIYITVIDSTG
KILEQRSLNTIQQFDYQKKLDNREKERVAARQAWSVVGTIKDLKQGYLSQVIHEIVDLMIHYQAVVVLENLNEGEKS
KRTGIAEKAVYQQFEKMLIDKLNCLVLKDYPAEKVGGVLNPYQLTDQFTSFAKMGTQSGELFYVPAPYTSKIDPLIG
FVDPFVWKTIKNHESRKHFLEGFDFLHYDVKTGDFILHFKMNRNLSFQRGLPGEMPAWDIVFEKNETQFDAKGTPFI
AGKRIVPVIENHRFTGRYRDLYPANELIALLEEKGIVERDGSNILPKLLENDDSHAIDTMVALIRSVLQMRNSNAAT
GEDYINSPVRDLNGVCEDSREQNPEWPMDADANGAYHIALKGQLLLNHLKESKDLKLQNGISNQDWLAYIQELRN
XPXPXPXPXPXPXP
MVSKGEEDNMAIIKEFMRFKVHMEGSVNGHEFEIEGEGEGRPYEGTQTAKLKVTKGGPLPFAWDILSPQFMYGSKA
YVKHPADIPDYLKLSFPEGFKWERVMNFEDGGVVTVTQDSSLQDGEFIYKVKLRGTNFPSDGPVMQKKTMGWEASS
ERMYPEDGALKGEIKQRLKLKDGGHYDAEVKTTYKAKKPVQLPGAYNVNIKLDITSHNEDYTIVEQYERAEGRHST
GGMDELYK
SEQ ID NO: 166
MTQFEGFTNLYQVSKTLRFELIPQGKILKHIQEQGFIEEDKARNDHYKELKPIIDRIYKTYADQCLQLVQLDWENLS
AAIDSYRKEKTEETRNALIEEQATYRNAIHDYFIGRIDNLTDAINKRHAEIYKGLFKAELENGKVLKQLGTVITTEH
ENALLRSEDKETTYFSGEYENRKNVESAEDISTAIPHRIVQDNFPKEKENCHIFTRLITAVPSLREHFENVKKAIGI
FVSTSIEEVESFPFYNQLLTQTQIDLYNQLLGGISREAGTEKIKGLNEVLNLAIQKNDETAHIIASLPHRFIPLEKQ
ILSDRNTLSFILEEEKSDEEVIQSECKYKILLRNENVLETAEALFNELNSIDLTHIFISHKKLETISSALCDHWDTL
RNALYERRISELTGKITKSAKEKVQRSLKHEDINLQEIISAAGKELSEAFKQKTSEILSHAHAALDQPLPTTLKKQE
EKEILKSQLDSLLGLYHLLDWFAVDESNEVDPEFSARLIGIKLEMEPSLSFYNKARNYATKKPYSVEKFKLNFQMPT
LASGWDVNKEKNNGAILFVKNGLYYLGIMPKQKGRYKALSFEPTEKTSEGFDKMYYDYFPDAAKMIPKCSTQLKAVT
AHFQTHTTPILLSNNFIEPLEITKEIYDLNNPEKEPKKFQTAYAKKTGDQKGYREALCKWIDETRDELSKYTKITSI
DLSSLRPSSQYKDLGEYYAELNPLLYHISFQRIAEKEIMDAVETGKLYLFQIYNKDFAKGHHGKPNLHTLYWTGLFS
PENLAKTSIKLNGQAELFYRPKSRMKRMAHRLGEKMLNKKLKDQKTPIPDTLYQELYDYVNHRLSHDLSDEARALLP
NVITKEVSHEIIKDRRFTSDKEFFHVPITLNYQAANSPSKENQRVNAYLKEHPETPIIGIDRGERNLIYITVIDSTG
KILEQRSLNTIQQFDYQKKLDNREKERVAARQAWSVVGTIKDLKQGYLSQVIHEIVDLMIHYQAVVVLENLNEGEKS
KRTGIAEKAVYQQFEKMLIDKLNCLVLKDYPAEKVGGVLNPYQLTDQFTSFAKMGTQSGELFYVPAPYTSKIDPLIG
FVDPFVWKTIKNHESRKHFLEGFDFLHYDVKTGDFILHFKMNRNLSFQRGLPGEMPAWDIVFEKNETQFDAKGTPFI
AGKRIVPVIENHRFTGRYRDLYPANELIALLEEKGIVERDGSNILPKLLENDDSHAIDTMVALIRSVLQMRNSNAAT
GEDYINSPVRDLNGVCEDSREQNPEWPMDADANGAYHIALKGQLLLNHLKESKDLKLQNGISNQDWLAYIQELRN
XPXPXPXPXPXPXPXP
MVSKGEEDNMAIIKEFMRFKVHMEGSVNGHEFEIEGEGEGRPYEGTQTAKLKVTKGGPLPFAWDILSPQFMYGSKA
YVKHPADIPDYLKLSFPEGFKWERVMNFEDGGVVTVTQDSSLQDGEFIYKVKLRGTNFPSDGPVMQKKTMGWEASS
ERMYPEDGALKGEIKQRLKLKDGGHYDAEVKTTYKAKKPVQLPGAYNVNIKLDITSHNEDYTIVEQYERAEGRHST
GGMDELYK
SEQ ID NO: 167
MTQFEGFTNLYQVSKTLRFELIPQGKILKHIQEQGFIEEDKARNDHYKELKPIIDRIYKTYADQCLQLVQLDWENLS
AAIDSYRKEKTEETRNALIEEQATYRNAIHDYFIGRIDNLTDAINKRHAEIYKGLFKAELENGKVLKQLGTVITTEH
ENALLRSEDKETTYFSGEYENRKNVESAEDISTAIPHRIVQDNFPKEKENCHIFTRLITAVPSLREHFENVKKAIGI
FVSTSIEEVESFPFYNQLLTQTQIDLYNQLLGGISREAGTEKIKGLNEVLNLAIQKNDETAHIIASLPHRFIPLEKQ
ILSDRNTLSFILEEEKSDEEVIQSECKYKILLRNENVLETAEALFNELNSIDLTHIFISHKKLETISSALCDHWDTL
RNALYERRISELTGKITKSAKEKVQRSLKHEDINLQEIISAAGKELSEAFKQKTSEILSHAHAALDQPLPTTLKKQE
EKEILKSQLDSLLGLYHLLDWFAVDESNEVDPEFSARLIGIKLEMEPSLSFYNKARNYATKKPYSVEKFKLNFQMPT
LASGWDVNKEKNNGAILFVKNGLYYLGIMPKQKGRYKALSFEPTEKTSEGFDKMYYDYFPDAAKMIPKCSTQLKAVT
AHFQTHTTPILLSNNFIEPLEITKEIYDLNNPEKEPKKFQTAYAKKTGDQKGYREALCKWIDETRDELSKYTKITSI
DLSSLRPSSQYKDLGEYYAELNPLLYHISFQRIAEKEIMDAVETGKLYLFQIYNKDFAKGHHGKPNLHTLYWTGLFS
PENLAKTSIKLNGQAELFYRPKSRMKRMAHRLGEKMLNKKLKDQKTPIPDTLYQELYDYVNHRLSHDLSDEARALLP
NVITKEVSHEIIKDRRFTSDKEFFHVPITLNYQAANSPSKENQRVNAYLKEHPETPIIGIDRGERNLIYITVIDSTG
KILEQRSLNTIQQFDYQKKLDNREKERVAARQAWSVVGTIKDLKQGYLSQVIHEIVDLMIHYQAVVVLENLNEGEKS
KRTGIAEKAVYQQFEKMLIDKLNCLVLKDYPAEKVGGVLNPYQLTDQFTSFAKMGTQSGELFYVPAPYTSKIDPLTG
FVDPFVWKTIKNHESRKHFLEGFDFLHYDVKTGDFILHFKMNRNLSFQRGLPGEMPAWDIVFEKNETQFDAKGTPFI
AGKRIVPVIENHRFTGRYRDLYPANELIALLEEKGIVFRDGSNILPKLLENDDSHAIDTMVALIRSVLQMRNSNAAT
GEDYINSPVRDLNGVCEDSREQNPEWPMDADANGAYHIALKGQLLLNHLKESKDLKLQNGISNQDWLAYIQELRN
XPXPXPXPXPXPXPXPXP
MVSKGEEDNMAIIKEFMRFKVHMEGSVNGHEFEIEGEGEGRPYEGTQTAKLKVTKGGPLPFAWDILSPQFMYGSKA
YVKHPADIPDYLKLSFPEGFKWERVMNFEDGGVVTVTQDSSLQDGEFIYKVKLRGTNFPSDGPVMQKKTMGWEASS
ERMYPEDGALKGEIKQRLKLKDGGHYDAEVKTTYKAKKPVQLPGAYNVNIKLDITSHNEDYTIVEQYERAEGRHST
GGMDELYK
SEQ ID NO: 168
MTQFEGFTNLYQVSKTLRFELIPQGKTLKHIQEQGFIEEDKARNDHYKELKPIIDRIYKTYADQCLQLVQLDWENLS
AAIDSYRKEKTEETRNALIEEQATYRNAIHDYFIGRIDNLTDAINKRHAEIYKGLFKAELENGKVLKQLGTVITTEH
ENALLRSFDKETTYFSGEYENRKNVESAEDISTAIPHRIVQDNFPKEKENCHIFTRLITAVPSLREHFENVKKAIGI
FVSTSIEEVFSFPFYNQLLTQTQIDLYNQLLGGISREAGTEKIKGLNEVLNLAIQKNDETAHIIASLPHRFIPLFKQ
ILSDRNTLSFILEEFKSDEEVIQSFCKYKILLRNENVLETAEALFNELNSIDLTHIFISHKKLETISSALCDHWDTL
RNALYERRISELTGKITKSAKEKVQRSLKHEDINLQEIISAAGKELSEAFKQKTSEILSHAHAALDQPLPTTLKKQE
EKEILKSQLDSLLGLYHLLDWFAVDESNEVDPEFSARLTGIKLEMEPSLSFYNKARNYATKKPYSVEKFKLNFQMPT
LASGWDVNKEKNNGAILFVKNGLYYLGIMPKQKGRYKALSFEPTEKTSEGFDKMYYDYFPDAAKMIPKCSTQLKAVT
AHFQTHTTPILLSNNFIEPLEITKEIYDLNNPEKEPKKFQTAYAKKTGDQKGYREALCKWIDETRDELSKYTKTTSI
DLSSLRPSSQYKDLGEYYAELNPLLYHISFQRIAEKEIMDAVETGKLYLFQIYNKDFAKGHHGKPNLHTLYWTGLFS
PENLAKTSIKLNGQAELFYRPKSRMKRMAHRLGEKMLNKKLKDQKTPIPDTLYQELYDYVNHRLSHDLSDEARALLP
NVITKEVSHEIIKDRRFTSDKEFFHVPITLNYQAANSPSKFNQRVNAYLKEHPETPIIGIDRGERNLIYITVIDSTG
KILEQRSLNTIQQFDYQKKLDNREKERVAARQAWSVVGTIKDLKQGYLSQVIHEIVDLMIHYQAVVVLENLNEGEKS
KRTGIAEKAVYQQFEKMLIDKLNCLVLKDYPAEKVGGVLNPYQLTDQFTSFAKMGTQSGELFYVPAPYTSKIDPLTG
FVDPFVWKTIKNHESRKHFLEGFDFLHYDVKTGDFILHFKMNRNLSFQRGLPGEMPAWDIVFEKNETQFDAKGTPFI
AGKRIVPVIENHRFTGRYRDLYPANELIALLEEKGIVFRDGSNILPKLLENDDSHAIDTMVALIRSVLQMRNSNAAT
GEDYINSPVRDLNGVCEDSREQNPEWPMDADANGAYHIALKGQLLLNHLKESKDLKLQNGISNQDWLAYIQELRN
XPXPXPXPXPXPXPXPXPXP
MVSKGEEDNMAIIKEFMRFKVHMEGSVNGHEFEIEGEGEGRPYEGTQTAKLKVTKGGPLPFAWDILSPQFMYGSKA
YVKHPADIPDYLKLSFPEGFKWERVMNFEDGGVVTVTQDSSLQDGEFIYKVKLRGTNFPSDGPVMQKKTMGWEASS
ERMYPEDGALKGEIKQRLKLKDGGHYDAEVKTTYKAKKPVQLPGAYNVNIKLDITSHNEDYTIVEQYERAEGRHST
GGMDELYK
SEQ ID NO: 169
MTQFEGFTNLYQVSKTLRFELIPQGKTLKHIQEQGFIEEDKARNDHYKELKPIIDRIYKTYADQCLQLVQLDWENLS
AAIDSYRKEKTEETRNALIEEQATYRNAIHDYFIGRIDNLTDAINKRHAEIYKGLFKAELENGKVLKQLGTVITTEH
ENALLRSFDKETTYFSGEYENRKNVESAEDISTAIPHRIVQDNFPKEKENCHIFTRLITAVPSLREHFENVKKAIGI
FVSTSIEEVFSFPFYNQLLTQTQIDLYNQLLGGISREAGTEKIKGLNEVLNLAIQKNDETAHIIASLPHRFIPLFKQ
ILSDRNTLSFILEEFKSDEEVIQSFCKYKILLRNENVLETAEALFNELNSIDLTHIFISHKKLETISSALCDHWDTL
RNALYERRISELTGKITKSAKEKVQRSLKHEDINLQEIISAAGKELSEAFKQKTSEILSHAHAALDQPLPTTLKKQE
EKEILKSQLDSLLGLYHLLDWFAVDESNEVDPEFSARLTGIKLEMEPSLSFYNKARNYATKKPYSVEKFKLNFQMPT
LASGWDVNKEKNNGAILFVKNGLYYLGIMPKQKGRYKALSFEPTEKTSEGFDKMYYDYFPDAAKMIPKCSTQLKAVT
AHFQTHTTPILLSNNFIEPLEITKEIYDLNNPEKEPKKFQTAYAKKTGDQKGYREALCKWIDETRDELSKYTKTTSI
DLSSLRPSSQYKDLGEYYAELNPLLYHISFQRIAEKEIMDAVETGKLYLFQIYNKDFAKGHHGKPNLHTLYWTGLFS
PENLAKTSIKLNGQAELFYRPKSRMKRMAHRLGEKMLNKKLKDQKTPIPDTLYQELYDYVNHRLSHDLSDEARALLP
NVITKEVSHEIIKDRRFTSDKEFFHVPITLNYQAANSPSKFNQRVNAYLKEHPETPIIGIDRGERNLIYITVIDSTG
KILEQRSLNTIQQFDYQKKLDNREKERVAARQAWSVVGTIKDLKQGYLSQVIHEIVDLMIHYQAVVVLENLNEGEKS
KRTGIAEKAVYQQFEKMLIDKLNCLVLKDYPAEKVGGVLNPYQLTDQFTSFAKMGTQSGELFYVPAPYTSKIDPLTG
FVDPFVWKTIKNHESRKHFLEGFDFLHYDVKTGDFILHFKMNRNLSFQRGLPGEMPAWDIVFEKNETQFDAKGTPFI
AGKRIVPVIENHRFTGRYRDLYPANELIALLEEKGIVFRDGSNILPKLLENDDSHAIDTMVALIRSVLQMRNSNAAT
GEDYINSPVRDLNGVCEDSREQNPEWPMDADANGAYHIALKGQLLLNHLKESKDLKLQNGISNQDWLAYIQELRN
XPXPXPXPXPXPXPXPXPXPXP
MVSKGEEDNMAIIKEFMRFKVHMEGSVNGHEFEIEGEGEGRPYEGTQTAKLKVTKGGPLPFAWDILSPQFMYGSKA
YVKHPADIPDYLKLSFPEGFKWERVMNFEDGGVVTVTQDSSLQDGEFIYKVKLRGTNFPSDGPVMQKKTMGWEASS
ERMYPEDGALKGEIKQRLKLKDGGHYDAEVKTTYKAKKPVQLPGAYNVNIKLDITSHNEDYTIVEQYERAEGRHST
GGMDELYK
SEQ ID NO: 170
MTQFEGFTNLYQVSKTLRFELIPQGKILKHIQEQGFIEEDKARNDHYKELKPIIDRIYKTYADQCLQLVQLDWENLS
AAIDSYRKEKTEETRNALIEEQATYRNAIHDYFIGRIDNLTDAINKRHAEIYKGLFKAELENGKVLKQLGTVITTEH
ENALLRSEDKETTYFSGEYENRKNVESAEDISTAIPHRIVQDNFPKEKENCHIFTRLITAVPSLREHFENVKKAIGI
FVSTSIEEVESFPFYNQLLTQTQIDLYNQLLGGISREAGTEKIKGLNEVLNLAIQKNDETAHIIASLPHRFIPLEKQ
ILSDRNTLSFILEEEKSDEEVIQSECKYKILLRNENVLETAEALFNELNSIDLTHIFISHKKLETISSALCDHWDTL
RNALYERRISELTGKITKSAKEKVQRSLKHEDINLQEIISAAGKELSEAFKQKTSEILSHAHAALDQPLPTTLKKQE
EKEILKSQLDSLLGLYHLLDWFAVDESNEVDPEFSARLIGIKLEMEPSLSFYNKARNYATKKPYSVEKFKLNFQMPT
LASGWDVNKEKNNGAILFVKNGLYYLGIMPKQKGRYKALSFEPTEKTSEGFDKMYYDYFPDAAKMIPKCSTQLKAVT
AHFQTHTTPILLSNNFIEPLEITKEIYDLNNPEKEPKKFQTAYAKKTGDQKGYREALCKWIDETRDELSKYTKITSI
DLSSLRPSSQYKDLGEYYAELNPLLYHISFQRIAEKEIMDAVETGKLYLFQIYNKDFAKGHHGKPNLHTLYWTGLFS
PENLAKTSIKLNGQAELFYRPKSRMKRMAHRLGEKMLNKKLKDQKTPIPDTLYQELYDYVNHRLSHDLSDEARALLP
NVITKEVSHEIIKDRRFTSDKEFFHVPITLNYQAANSPSKENQRVNAYLKEHPETPIIGIDRGERNLIYITVIDSTG
KILEQRSLNTIQQFDYQKKLDNREKERVAARQAWSVVGTIKDLKQGYLSQVIHEIVDLMIHYQAVVVLENLNEGEKS
KRTGIAEKAVYQQFEKMLIDKLNCLVLKDYPAEKVGGVLNPYQLTDQFTSFAKMGTQSGELFYVPAPYTSKIDPLIG
FVDPFVWKTIKNHESRKHFLEGFDFLHYDVKTGDFILHFKMNRNLSFQRGLPGEMPAWDIVFEKNETQFDAKGTPFI
AGKRIVPVIENHRFTGRYRDLYPANELIALLEEKGIVERDGSNILPKLLENDDSHAIDTMVALIRSVLQMRNSNAAT
GEDYINSPVRDLNGVCEDSREQNPEWPMDADANGAYHIALKGQLLLNHLKESKDLKLQNGISNQDWLAYIQELRN
XPXPXPXPXPXPXPXPXPXPXPXP
MVSKGEEDNMAIIKEFMRFKVHMEGSVNGHEFEIEGEGEGRPYEGTQTAKLKVTKGGPLPFAWDILSPQFMYGSKA
YVKHPADIPDYLKLSFPEGFKWERVMNFEDGGVVTVTQDSSLQDGEFIYKVKLRGTNFPSDGPVMQKKTMGWEASS
ERMYPEDGALKGEIKQRLKLKDGGHYDAEVKTTYKAKKPVQLPGAYNVNIKLDITSHNEDYTIVEQYERAEGRHST
GGMDELYK
SEQ ID NO: 171
MTQFEGFTNLYQVSKTLRFELIPQGKILKHIQEQGFIEEDKARNDHYKELKPIIDRIYKTYADQCLQLVQLDWENLS
AAIDSYRKEKTEETRNALIEEQATYRNAIHDYFIGRIDNLTDAINKRHAEIYKGLFKAELENGKVLKQLGTVITTEH
ENALLRSEDKETTYFSGEYENRKNVESAEDISTAIPHRIVQDNFPKEKENCHIFTRLITAVPSLREHFENVKKAIGI
FVSTSIEEVESFPFYNQLLTQTQIDLYNQLLGGISREAGTEKIKGLNEVLNLAIQKNDETAHIIASLPHRFIPLEKQ
ILSDRNTLSFILEEEKSDEEVIQSECKYKILLRNENVLETAEALFNELNSIDLTHIFISHKKLETISSALCDHWDTL
RNALYERRISELTGKITKSAKEKVQRSLKHEDINLQEIISAAGKELSEAFKQKTSEILSHAHAALDQPLPTTLKKQE
EKEILKSQLDSLLGLYHLLDWFAVDESNEVDPEFSARLIGIKLEMEPSLSFYNKARNYATKKPYSVEKFKLNFQMPT
LASGWDVNKEKNNGAILFVKNGLYYLGIMPKQKGRYKALSFEPTEKTSEGFDKMYYDYFPDAAKMIPKCSTQLKAVT
AHFQTHTTPILLSNNFIEPLEITKEIYDLNNPEKEPKKFQTAYAKKTGDQKGYREALCKWIDETRDELSKYTKITSI
DLSSLRPSSQYKDLGEYYAELNPLLYHISFQRIAEKEIMDAVETGKLYLFQIYNKDFAKGHHGKPNLHTLYWTGLFS
PENLAKTSIKLNGQAELFYRPKSRMKRMAHRLGEKMLNKKLKDQKTPIPDTLYQELYDYVNHRLSHDLSDEARALLP
NVITKEVSHEIIKDRRFTSDKEFFHVPITLNYQAANSPSKENQRVNAYLKEHPETPIIGIDRGERNLIYITVIDSTG
KILEQRSLNTIQQFDYQKKLDNREKERVAARQAWSVVGTIKDLKQGYLSQVIHEIVDLMIHYQAVVVLENLNEGEKS
KRTGIAEKAVYQQFEKMLIDKLNCLVLKDYPAEKVGGVLNPYQLTDQFTSFAKMGTQSGELFYVPAPYTSKIDPLIG
FVDPFVWKTIKNHESRKHFLEGFDFLHYDVKTGDFILHFKMNRNLSFQRGLPGEMPAWDIVFEKNETQFDAKGTPFI
AGKRIVPVIENHRFTGRYRDLYPANELIALLEEKGIVERDGSNILPKLLENDDSHAIDTMVALIRSVLQMRNSNAAT
GEDYINSPVRDLNGVCEDSREQNPEWPMDADANGAYHIALKGQLLLNHLKESKDLKLQNGISNQDWLAYIQELRN
XPXPXPXPXPXPXPXPXPXPXPXPXP
MVSKGEEDNMAIIKEFMRFKVHMEGSVNGHEFEIEGEGEGRPYEGTQTAKLKVTKGGPLPFAWDILSPQFMYGSKA
YVKHPADIPDYLKLSFPEGFKWERVMNFEDGGVVTVTQDSSLQDGEFIYKVKLRGTNFPSDGPVMQKKTMGWEASS
ERMYPEDGALKGEIKQRLKLKDGGHYDAEVKTTYKAKKPVQLPGAYNVNIKLDITSHNEDYTIVEQYERAEGRHST
GGMDELYK
SEQ ID NO: 172
MTQFEGFTNLYQVSKTLRFELIPQGKILKHIQEQGFIEEDKARNDHYKELKPIIDRIYKTYADQCLQLVQLDWENLS
AAIDSYRKEKTEETRNALIEEQATYRNAIHDYFIGRIDNLTDAINKRHAEIYKGLFKAELENGKVLKQLGTVITTEH
ENALLRSEDKETTYFSGEYENRKNVESAEDISTAIPHRIVQDNFPKEKENCHIFTRLITAVPSLREHFENVKKAIGI
FVSTSIEEVESFPFYNQLLTQTQIDLYNQLLGGISREAGTEKIKGLNEVLNLAIQKNDETAHIIASLPHRFIPLEKQ
ILSDRNTLSFILEEEKSDEEVIQSECKYKILLRNENVLETAEALFNELNSIDLTHIFISHKKLETISSALCDHWDTL
RNALYERRISELTGKITKSAKEKVQRSLKHEDINLQEIISAAGKELSEAFKQKTSEILSHAHAALDQPLPTTLKKQE
EKEILKSQLDSLLGLYHLLDWFAVDESNEVDPEFSARLIGIKLEMEPSLSFYNKARNYATKKPYSVEKFKLNFQMPT
LASGWDVNKEKNNGAILFVKNGLYYLGIMPKQKGRYKALSFEPTEKTSEGFDKMYYDYFPDAAKMIPKCSTQLKAVT
AHFQTHTTPILLSNNFIEPLEITKEIYDLNNPEKEPKKFQTAYAKKTGDQKGYREALCKWIDETRDELSKYTKITSI
DLSSLRPSSQYKDLGEYYAELNPLLYHISFQRIAEKEIMDAVETGKLYLFQIYNKDFAKGHHGKPNLHTLYWTGLFS
PENLAKTSIKLNGQAELFYRPKSRMKRMAHRLGEKMLNKKLKDQKTPIPDTLYQELYDYVNHRLSHDLSDEARALLP
NVITKEVSHEIIKDRRFTSDKEFFHVPITLNYQAANSPSKENQRVNAYLKEHPETPIIGIDRGERNLIYITVIDSTG
KILEQRSLNTIQQFDYQKKLDNREKERVAARQAWSVVGTIKDLKQGYLSQVIHEIVDLMIHYQAVVVLENLNEGEKS
KRTGIAEKAVYQQFEKMLIDKLNCLVLKDYPAEKVGGVLNPYQLTDQFTSFAKMGTQSGELFYVPAPYTSKIDPLIG
FVDPFVWKTIKNHESRKHFLEGFDFLHYDVKTGDFILHFKMNRNLSFQRGLPGEMPAWDIVFEKNETQFDAKGTPFI
AGKRIVPVIENHRFTGRYRDLYPANELIALLEEKGIVERDGSNILPKLLENDDSHAIDTMVALIRSVLQMRNSNAAT
GEDYINSPVRDLNGVCEDSREQNPEWPMDADANGAYHIALKGQLLLNHLKESKDLKLQNGISNQDWLAYIQELRN
XPXPXPXPXPXPXPXPXPXPXPXPXPXP
MVSKGEEDNMAIIKEFMRFKVHMEGSVNGHEFEIEGEGEGRPYEGTQTAKLKVTKGGPLPFAWDILSPQFMYGSKA
YVKHPADIPDYLKLSFPEGFKWERVMNFEDGGVVTVTQDSSLQDGEFIYKVKLRGTNFPSDGPVMQKKTMGWEASS
ERMYPEDGALKGEIKQRLKLKDGGHYDAEVKTTYKAKKPVQLPGAYNVNIKLDITSHNEDYTIVEQYERAEGRHST
GGMDELYK
SEQ ID NO: 173
MTQFEGFTNLYQVSKTLRFELIPQGKILKHIQEQGFIEEDKARNDHYKELKPIIDRIYKTYADQCLQLVQLDWENLS
AAIDSYRKEKTEETRNALIEEQATYRNAIHDYFIGRIDNLTDAINKRHAEIYKGLFKAELENGKVLKQLGTVITTEH
ENALLRSEDKETTYFSGEYENRKNVESAEDISTAIPHRIVQDNFPKEKENCHIFTRLITAVPSLREHFENVKKAIGI
FVSTSIEEVESFPFYNQLLTQTQIDLYNQLLGGISREAGTEKIKGLNEVLNLAIQKNDETAHIIASLPHRFIPLEKQ
ILSDRNTLSFILEEEKSDEEVIQSECKYKILLRNENVLETAEALFNELNSIDLTHIFISHKKLETISSALCDHWDTL
RNALYERRISELTGKITKSAKEKVQRSLKHEDINLQEIISAAGKELSEAFKQKTSEILSHAHAALDQPLPTTLKKQE
EKEILKSQLDSLLGLYHLLDWFAVDESNEVDPEFSARLIGIKLEMEPSLSFYNKARNYATKKPYSVEKFKLNFQMPT
LASGWDVNKEKNNGAILFVKNGLYYLGIMPKQKGRYKALSFEPTEKTSEGFDKMYYDYFPDAAKMIPKCSTQLKAVT
AHFQTHTTPILLSNNFIEPLEITKEIYDLNNPEKEPKKFQTAYAKKTGDQKGYREALCKWIDETRDELSKYTKITSI
DLSSLRPSSQYKDLGEYYAELNPLLYHISFQRIAEKEIMDAVETGKLYLFQIYNKDFAKGHHGKPNLHTLYWTGLFS
PENLAKTSIKLNGQAELFYRPKSRMKRMAHRLGEKMLNKKLKDQKTPIPDTLYQELYDYVNHRLSHDLSDEARALLP
NVITKEVSHEIIKDRRFTSDKEFFHVPITLNYQAANSPSKENQRVNAYLKEHPETPIIGIDRGERNLIYITVIDSTG
KILEQRSLNTIQQFDYQKKLDNREKERVAARQAWSVVGTIKDLKQGYLSQVIHEIVDLMIHYQAVVVLENLNEGEKS
KRTGIAEKAVYQQFEKMLIDKLNCLVLKDYPAEKVGGVLNPYQLTDQFTSFAKMGTQSGELFYVPAPYTSKIDPLIG
FVDPFVWKTIKNHESRKHFLEGFDFLHYDVKTGDFILHFKMNRNLSFQRGLPGEMPAWDIVFEKNETQFDAKGTPFI
AGKRIVPVIENHRFTGRYRDLYPANELIALLEEKGIVERDGSNILPKLLENDDSHAIDTMVALIRSVLQMRNSNAAT
GEDYINSPVRDLNGVCEDSREQNPEWPMDADANGAYHIALKGQLLLNHLKESKDLKLQNGISNQDWLAYIQELRN
GGGGSEAAAKGGGGS
MVSKGEEDNMAIIKEFMRFKVHMEGSVNGHEFEIEGEGEGRPYEGTQTAKLKVTKGGPLPFAWDILSPQFMYGSKA
YVKHPADIPDYLKLSFPEGFKWERVMNFEDGGVVTVTQDSSLQDGEFIYKVKLRGTNFPSDGPVMQKKTMGWEASS
ERMYPEDGALKGEIKQRLKLKDGGHYDAEVKTTYKAKKPVQLPGAYNVNIKLDITSHNEDYTIVEQYERAEGRHST
GGMDELYK

[0099] Table V.5 provides chimera fusion proteins between LbCas12a amino acid sequences, linker amino acid sequences (underlined), and eGFP amino acid sequences (bolded, italicized).

TABLE V.5
LbCas12a-Linker-eGFP Chimeras

SEQ ID NO: 174
MSKLEKFTNCYSLSKTLRFKAIPVGKTQENIDNKRLLVEDEKRAEDYKGVKKLLDRYYLSFINDVLHSIKLKNLNNY
ISLFRKKTRTEKENKELENLEINLRKEIAKAFKGNEGYKSLFKKDIIETILPEFLDDKDEIALVNSENGETTAFTGE
FDNRENMESEEAKSTSIAFRCINENLTRYISNMDIFEKVDAIFDKHEVQEIKEKILNSDYDVEDFFEGEFFNEVLIQ
EGIDVYNAIIGGFVTESGEKIKGLNEYINLYNQKTKQKLPKFKPLYKQVLSDRESLSFYGEGYTSDEEVLEVERNTL
NKNSEIFSSIKKLEKLFKNFDEYSSAGIFVKNGPAISTISKDIFGEWNVIRDKWNAEYDDIHLKKKAVVTEKYEDDR
RKSFKKIGSFSLEQLQEYADADLSVVEKLKEIIIQKVDEIYKVYGSSEKLFDADFVLEKSLKKNDAVVAIMKDLLDS
VKSFENYIKAFFGEGKETNRDESFYGDFVLAYDILLKVDHIYDAIRNYVTQKPYSKDKFKLYFQNPQFMGGWDKDKE
TDYRATILRYGSKYYLAIMDKKYAKCLQKIDKDDVNGNYEKINYKLLPGPNKMLPKVFFSKKWMAYYNPSEDIQKIY
KNGTFKKGDMFNLNDCHKLIDFFKDSISRYPKWSNAYDENFSETEKYKDIAGFYREVEEQGYKVSFESASKKEVDKL
VEEGKLYMFQIYNKDFSDKSHGTPNLHTMYFKLLFDENNHGQIRLSGGAELFMRRASLKKEELVVHPANSPIANKNP
DNPKKITTLSYDVYKDKRESEDQYELHIPIAINKCPKNIFKINTEVRVLLKHDDNPYVIGIDRGERNLLYIVVVDGK
GNIVEQYSLNEIINNFNGIRIKTDYHSLLDKKEKERFEARQNWTSIENIKELKAGYISQVVHKICELVEKYDAVIAL
EDLNSGFKNSRVKVEKQVYQKFEKMLIDKLNYMVDKKSNPCATGGALKGYQITNKFESFKSMSTQNGFIFYIPAWLT
SKIDPSTGFVNLLKTKYTSIADSKKFISSFDRIMYVPEEDLFEFALDYKNFSRTDADYIKKWKLYSYGNRIRIFRNP
KKNNVEDWEEVCLTSAYKELENKYGINYQQGDIRALLCEQSDKAFYSSFMALMSLMLQMRNSITGRTDVDFLISPVK
NSDGIFYDSRNYEAQENAILPKNADANGAYNIARKVLWAIGQFKKAEDEKLDKVKIAISNKEWLEYAQTSVKH
GSAGSAAGSGEF
MVSKGEELFTGVVPILVELDGDVNGHKFSVSGEGEGDATYGKLTLKFICTTGKLPVPWPTLVTT
LTYGVQCFSRYPDHMKQHDFFKSAMPEGYVQERTIFFKDDGNYKTRAEVKFEGDTLVNRIELKGIDFKEDGNILGH
KLEYNYNSHNVYIMADKQKNGIKVNFKIRHNIEDGSVQLADHYQQNTPIGDGPVLLPDNHYLSTQSALSKDPNEKR
DHMVLLEFVTAAGITLGMDELYK
SEQ ID NO: 175
MSKLEKFTNCYSLSKTLRFKAIPVGKTQENIDNKRLLVEDEKRAEDYKGVKKLLDRYYLSFINDVLHSIKLKNLNNY
ISLFRKKTRTEKENKELENLEINLRKEIAKAFKGNEGYKSLFKKDIIETILPEFLDDKDEIALVNSENGETTAFTGE
FDNRENMESEEAKSTSIAFRCINENLTRYISNMDIFEKVDAIFDKHEVQEIKEKILNSDYDVEDFFEGEFFNEVLIQ
EGIDVYNAIIGGFVTESGEKIKGLNEYINLYNQKTKQKLPKFKPLYKQVLSDRESLSFYGEGYTSDEEVLEVERNTL
NKNSEIFSSIKKLEKLFKNFDEYSSAGIFVKNGPAISTISKDIFGEWNVIRDKWNAEYDDIHLKKKAVVTEKYEDDR
RKSFKKIGSFSLEQLQEYADADLSVVEKLKEIIIQKVDEIYKVYGSSEKLFDADFVLEKSLKKNDAVVAIMKDLLDS
VKSFENYIKAFFGEGKETNRDESFYGDFVLAYDILLKVDHIYDAIRNYVTQKPYSKDKFKLYFQNPQFMGGWDKDKE
TDYRATILRYGSKYYLAIMDKKYAKCLQKIDKDDVNGNYEKINYKLLPGPNKMLPKVFFSKKWMAYYNPSEDIQKIY
KNGTFKKGDMFNLNDCHKLIDFFKDSISRYPKWSNAYDENFSETEKYKDIAGFYREVEEQGYKVSFESASKKEVDKL
VEEGKLYMFQIYNKDFSDKSHGTPNLHTMYFKLLFDENNHGQIRLSGGAELFMRRASLKKEELVVHPANSPIANKNP
DNPKKITTLSYDVYKDKRESEDQYELHIPIAINKCPKNIFKINTEVRVLLKHDDNPYVIGIDRGERNLLYIVVVDGK
GNIVEQYSLNEIINNFNGIRIKTDYHSLLDKKEKERFEARQNWTSIENIKELKAGYISQVVHKICELVEKYDAVIAL
EDLNSGFKNSRVKVEKQVYQKFEKMLIDKLNYMVDKKSNPCATGGALKGYQITNKFESFKSMSTQNGFIFYIPAWLT
SKIDPSTGFVNLLKTKYTSIADSKKFISSFDRIMYVPEEDLFEFALDYKNFSRTDADYIKKWKLYSYGNRIRIFRNP
KKNNVEDWEEVCLTSAYKELENKYGINYQQGDIRALLCEQSDKAFYSSFMALMSLMLQMRNSITGRTDVDFLISPVK
NSDGIFYDSRNYEAQENAILPKNADANGAYNIARKVLWAIGQFKKAEDEKLDKVKIAISNKEWLEYAQTSVKH
GGGGSGGGGSGGGGSGGGGS
MVSKGEELFTGVVPILVELDGDVNGHKFSVSGEGEGDATYGKLTLKFICTTGKLPVPWPTLVTT
LTYGVQCFSRYPDHMKQHDFFKSAMPEGYVQERTIFFKDDGNYKTRAEVKFEGDTLVNRIELKGIDFKEDGNILGH
KLEYNYNSHNVYIMADKQKNGIKVNFKIRHNIEDGSVQLADHYQQNTPIGDGPVLLPDNHYLSTQSALSKDPNEKR
DHMVLLEFVTAAGITLGMDELYK
SEQ ID NO: 176
MSKLEKFTNCYSLSKTLRFKAIPVGKTQENIDNKRLLVEDEKRAEDYKGVKKLLDRYYLSFINDVLHSIKLKNLNNY
ISLFRKKTRTEKENKELENLEINLRKEIAKAFKGNEGYKSLFKKDIIETILPEFLDDKDEIALVNSENGETTAFTGE
FDNRENMESEEAKSTSIAFRCINENLTRYISNMDIFEKVDAIFDKHEVQEIKEKILNSDYDVEDFFEGEFFNEVLIQ
EGIDVYNAIIGGFVTESGEKIKGLNEYINLYNQKTKQKLPKFKPLYKQVLSDRESLSFYGEGYTSDEEVLEVERNTL
NKNSEIFSSIKKLEKLFKNFDEYSSAGIFVKNGPAISTISKDIFGEWNVIRDKWNAEYDDIHLKKKAVVTEKYEDDR
RKSFKKIGSFSLEQLQEYADADLSVVEKLKEIIIQKVDEIYKVYGSSEKLFDADFVLEKSLKKNDAVVAIMKDLLDS
VKSFENYIKAFFGEGKETNRDESFYGDFVLAYDILLKVDHIYDAIRNYVTQKPYSKDKFKLYFQNPQFMGGWDKDKE
TDYRATILRYGSKYYLAIMDKKYAKCLQKIDKDDVNGNYEKINYKLLPGPNKMLPKVFFSKKWMAYYNPSEDIQKIY
KNGTFKKGDMFNLNDCHKLIDFFKDSISRYPKWSNAYDENFSETEKYKDIAGFYREVEEQGYKVSFESASKKEVDKL
VEEGKLYMFQIYNKDFSDKSHGTPNLHTMYFKLLFDENNHGQIRLSGGAELFMRRASLKKEELVVHPANSPIANKNP
DNPKKITTLSYDVYKDKRESEDQYELHIPIAINKCPKNIFKINTEVRVLLKHDDNPYVIGIDRGERNLLYIVVVDGK
GNIVEQYSLNEIINNFNGIRIKTDYHSLLDKKEKERFEARQNWTSIENIKELKAGYISQVVHKICELVEKYDAVIAL
EDLNSGFKNSRVKVEKQVYQKFEKMLIDKLNYMVDKKSNPCATGGALKGYQITNKFESFKSMSTQNGFIFYIPAWLT
SKIDPSTGFVNLLKTKYTSIADSKKFISSFDRIMYVPEEDLFEFALDYKNFSRTDADYIKKWKLYSYGNRIRIFRNP
KKNNVEDWEEVCLTSAYKELENKYGINYQQGDIRALLCEQSDKAFYSSFMALMSLMLQMRNSITGRTDVDFLISPVK
NSDGIFYDSRNYEAQENAILPKNADANGAYNIARKVLWAIGQFKKAEDEKLDKVKIAISNKEWLEYAQTSVKH
AEAAAKEAAAKEAAAKEAAAKA
MVSKGEELFTGVVPILVELDGDVNGHKFSVSGEGEGDATYGKLTLKFICTTGKLPVPWPTLVTT
LTYGVQCFSRYPDHMKQHDFFKSAMPEGYVQERTIFFKDDGNYKTRAEVKFEGDTLVNRIELKGIDFKEDGNILGH
KLEYNYNSHNVYIMADKQKNGIKVNFKIRHNIEDGSVQLADHYQQNTPIGDGPVLLPDNHYLSTQSALSKDPNEKR
DHMVLLEFVTAAGITLGMDELYK
SEQ ID NO: 177
MSKLEKFTNCYSLSKTLRFKAIPVGKTQENIDNKRLLVEDEKRAEDYKGVKKLLDRYYLSFINDVLHSIKLKNLNNY
ISLFRKKTRTEKENKELENLEINLRKEIAKAFKGNEGYKSLFKKDIIETILPEFLDDKDEIALVNSENGETTAFTGE
FDNRENMESEEAKSTSIAFRCINENLTRYISNMDIFEKVDAIFDKHEVQEIKEKILNSDYDVEDFFEGEFFNEVLIQ
EGIDVYNAIIGGFVTESGEKIKGLNEYINLYNQKTKQKLPKFKPLYKQVLSDRESLSFYGEGYTSDEEVLEVERNTL
NKNSEIFSSIKKLEKLFKNFDEYSSAGIFVKNGPAISTISKDIFGEWNVIRDKWNAEYDDIHLKKKAVVTEKYEDDR
RKSFKKIGSFSLEQLQEYADADLSVVEKLKEIIIQKVDEIYKVYGSSEKLFDADFVLEKSLKKNDAVVAIMKDLLDS
VKSFENYIKAFFGEGKETNRDESFYGDFVLAYDILLKVDHIYDAIRNYVTQKPYSKDKFKLYFQNPQFMGGWDKDKE
TDYRATILRYGSKYYLAIMDKKYAKCLQKIDKDDVNGNYEKINYKLLPGPNKMLPKVFFSKKWMAYYNPSEDIQKIY
KNGTFKKGDMFNLNDCHKLIDFFKDSISRYPKWSNAYDENFSETEKYKDIAGFYREVEEQGYKVSFESASKKEVDKL
VEEGKLYMFQIYNKDFSDKSHGTPNLHTMYFKLLFDENNHGQIRLSGGAELFMRRASLKKEELVVHPANSPIANKNP
DNPKKITTLSYDVYKDKRESEDQYELHIPIAINKCPKNIFKINTEVRVLLKHDDNPYVIGIDRGERNLLYIVVVDGK
GNIVEQYSLNEIINNFNGIRIKTDYHSLLDKKEKERFEARQNWTSIENIKELKAGYISQVVHKICELVEKYDAVIAL
EDLNSGFKNSRVKVEKQVYQKFEKMLIDKLNYMVDKKSNPCATGGALKGYQITNKFESFKSMSTQNGFIFYIPAWLT
SKIDPSTGFVNLLKTKYTSIADSKKFISSFDRIMYVPEEDLFEFALDYKNFSRTDADYIKKWKLYSYGNRIRIFRNP
KKNNVEDWEEVCLTSAYKELENKYGINYQQGDIRALLCEQSDKAFYSSFMALMSLMLQMRNSITGRTDVDFLISPVK
NSDGIFYDSRNYEAQENAILPKNADANGAYNIARKVLWAIGQFKKAEDEKLDKVKIAISNKEWLEYAQTSVKH
AEAAAKEAAAKEAAAKEAAAKALEAEAAAKEAAAKEAAAKEAAAKA
MVSKGEELFTGVVPILVELDGDVNGHKFSVSGEGEGDATYGKLTLKFICTTGKLPVPWPTLVTT
LTYGVQCFSRYPDHMKQHDFFKSAMPEGYVQERTIFFKDDGNYKTRAEVKFEGDTLVNRIELKGIDFKEDGNILGH
KLEYNYNSHNVYIMADKQKNGIKVNFKIRHNIEDGSVQLADHYQQNTPIGDGPVLLPDNHYLSTQSALSKDPNEKR
DHMVLLEFVTAAGITLGMDELYK
SEQ ID NO: 178
MSKLEKFTNCYSLSKTLRFKAIPVGKTQENIDNKRLLVEDEKRAEDYKGVKKLLDRYYLSFINDVLHSIKLKNLNNY
ISLFRKKTRTEKENKELENLEINLRKEIAKAFKGNEGYKSLFKKDIIETILPEFLDDKDEIALVNSENGETTAFTGE
FDNRENMESEEAKSTSIAFRCINENLTRYISNMDIFEKVDAIFDKHEVQEIKEKILNSDYDVEDFFEGEFFNEVLIQ
EGIDVYNAIIGGFVTESGEKIKGLNEYINLYNQKTKQKLPKFKPLYKQVLSDRESLSFYGEGYTSDEEVLEVERNTL
NKNSEIFSSIKKLEKLFKNFDEYSSAGIFVKNGPAISTISKDIFGEWNVIRDKWNAEYDDIHLKKKAVVTEKYEDDR
RKSFKKIGSFSLEQLQEYADADLSVVEKLKEIIIQKVDEIYKVYGSSEKLFDADFVLEKSLKKNDAVVAIMKDLLDS
VKSFENYIKAFFGEGKETNRDESFYGDFVLAYDILLKVDHIYDAIRNYVTQKPYSKDKFKLYFQNPQFMGGWDKDKE
TDYRATILRYGSKYYLAIMDKKYAKCLQKIDKDDVNGNYEKINYKLLPGPNKMLPKVFFSKKWMAYYNPSEDIQKIY
KNGTFKKGDMFNLNDCHKLIDFFKDSISRYPKWSNAYDENFSETEKYKDIAGFYREVEEQGYKVSFESASKKEVDKL
VEEGKLYMFQIYNKDFSDKSHGTPNLHTMYFKLLFDENNHGQIRLSGGAELFMRRASLKKEELVVHPANSPIANKNP
DNPKKITTLSYDVYKDKRESEDQYELHIPIAINKCPKNIFKINTEVRVLLKHDDNPYVIGIDRGERNLLYIVVVDGK
GNIVEQYSLNEIINNFNGIRIKTDYHSLLDKKEKERFEARQNWTSIENIKELKAGYISQVVHKICELVEKYDAVIAL
EDLNSGFKNSRVKVEKQVYQKFEKMLIDKLNYMVDKKSNPCATGGALKGYQITNKFESFKSMSTQNGFIFYIPAWLT
SKIDPSTGFVNLLKTKYTSIADSKKFISSFDRIMYVPEEDLFEFALDYKNFSRTDADYIKKWKLYSYGNRIRIFRNP
KKNNVEDWEEVCLTSAYKELENKYGINYQQGDIRALLCEQSDKAFYSSFMALMSLMLQMRNSITGRTDVDFLISPVK
NSDGIFYDSRNYEAQENAILPKNADANGAYNIARKVLWAIGQFKKAEDEKLDKVKIAISNKEWLEYAQTSVKH
LEAEAAAKEAAAKEAAAKEAAAKALEAEAAAKEAAAKEAAAKEAAAKALE
MVSKGEELFTGVVPILVELDGDVNGHKFSVSGEGEGDATYGKLTLKFICTTGKLPVPWPTLVTT
LTYGVQCFSRYPDHMKQHDFFKSAMPEGYVQERTIFFKDDGNYKTRAEVKFEGDTLVNRIELKGIDFKEDGNILGH
KLEYNYNSHNVYIMADKQKNGIKVNFKIRHNIEDGSVQLADHYQQNTPIGDGPVLLPDNHYLSTQSALSKDPNEKR
DHMVLLEFVTAAGITLGMDELYK
SEQ ID NO: 179
MSKLEKFTNCYSLSKTLRFKAIPVGKTQENIDNKRLLVEDEKRAEDYKGVKKLLDRYYLSFINDVLHSIKLKNLNNY
ISLFRKKTRTEKENKELENLEINLRKEIAKAFKGNEGYKSLFKKDIIETILPEFLDDKDEIALVNSENGETTAFTGE
FDNRENMESEEAKSTSIAFRCINENLTRYISNMDIFEKVDAIFDKHEVQEIKEKILNSDYDVEDFFEGEFFNEVLIQ
EGIDVYNAIIGGFVTESGEKIKGLNEYINLYNQKTKQKLPKFKPLYKQVLSDRESLSFYGEGYTSDEEVLEVERNTL
NKNSEIFSSIKKLEKLFKNFDEYSSAGIFVKNGPAISTISKDIFGEWNVIRDKWNAEYDDIHLKKKAVVTEKYEDDR
RKSFKKIGSFSLEQLQEYADADLSVVEKLKEIIIQKVDEIYKVYGSSEKLFDADFVLEKSLKKNDAVVAIMKDLLDS
VKSFENYIKAFFGEGKETNRDESFYGDFVLAYDILLKVDHIYDAIRNYVTQKPYSKDKFKLYFQNPQFMGGWDKDKE
TDYRATILRYGSKYYLAIMDKKYAKCLQKIDKDDVNGNYEKINYKLLPGPNKMLPKVFFSKKWMAYYNPSEDIQKIY
KNGTFKKGDMFNLNDCHKLIDFFKDSISRYPKWSNAYDENFSETEKYKDIAGFYREVEEQGYKVSFESASKKEVDKL
VEEGKLYMFQIYNKDFSDKSHGTPNLHTMYFKLLFDENNHGQIRLSGGAELFMRRASLKKEELVVHPANSPIANKNP
DNPKKITTLSYDVYKDKRESEDQYELHIPIAINKCPKNIFKINTEVRVLLKHDDNPYVIGIDRGERNLLYIVVVDGK
GNIVEQYSLNEIINNFNGIRIKTDYHSLLDKKEKERFEARQNWTSIENIKELKAGYISQVVHKICELVEKYDAVIAL
EDLNSGFKNSRVKVEKQVYQKFEKMLIDKLNYMVDKKSNPCATGGALKGYQITNKFESFKSMSTQNGFIFYIPAWLT
SKIDPSTGFVNLLKTKYTSIADSKKFISSFDRIMYVPEEDLFEFALDYKNFSRTDADYIKKWKLYSYGNRIRIFRNP
KKNNVEDWEEVCLTSAYKELENKYGINYQQGDIRALLCEQSDKAFYSSFMALMSLMLQMRNSITGRTDVDFLISPVK
NSDGIFYDSRNYEAQENAILPKNADANGAYNIARKVLWAIGQFKKAEDEKLDKVKIAISNKEWLEYAQTSVKH
APA
MVSKGEELFTGVVPILVELDGDVNGHKFSVSGEGEGDATYGKLTLKFICTTGKLPVPWPTLVTT
LTYGVQCFSRYPDHMKQHDFFKSAMPEGYVQERTIFFKDDGNYKTRAEVKFEGDTLVNRIELKGIDFKEDGNILGH
KLEYNYNSHNVYIMADKQKNGIKVNFKIRHNIEDGSVQLADHYQQNTPIGDGPVLLPDNHYLSTQSALSKDPNEKR
DHMVLLEFVTAAGITLGMDELYK
SEQ ID NO: 180
MSKLEKFTNCYSLSKTLRFKAIPVGKTQENIDNKRLLVEDEKRAEDYKGVKKLLDRYYLSFINDVLHSIKLKNLNNY
ISLFRKKTRTEKENKELENLEINLRKEIAKAFKGNEGYKSLFKKDIIETILPEFLDDKDEIALVNSENGETTAFTGE
FDNRENMESEEAKSTSIAFRCINENLTRYISNMDIFEKVDAIFDKHEVQEIKEKILNSDYDVEDFFEGEFFNEVLIQ
EGIDVYNAIIGGFVTESGEKIKGLNEYINLYNQKTKQKLPKFKPLYKQVLSDRESLSFYGEGYTSDEEVLEVERNTL
NKNSEIFSSIKKLEKLFKNFDEYSSAGIFVKNGPAISTISKDIFGEWNVIRDKWNAEYDDIHLKKKAVVTEKYEDDR
RKSFKKIGSFSLEQLQEYADADLSVVEKLKEIIIQKVDEIYKVYGSSEKLFDADFVLEKSLKKNDAVVAIMKDLLDS
VKSFENYIKAFFGEGKETNRDESFYGDFVLAYDILLKVDHIYDAIRNYVTQKPYSKDKFKLYFQNPQFMGGWDKDKE
TDYRATILRYGSKYYLAIMDKKYAKCLQKIDKDDVNGNYEKINYKLLPGPNKMLPKVFFSKKWMAYYNPSEDIQKIY
KNGTFKKGDMFNLNDCHKLIDFFKDSISRYPKWSNAYDENFSETEKYKDIAGFYREVEEQGYKVSFESASKKEVDKL
VEEGKLYMFQIYNKDFSDKSHGTPNLHTMYFKLLFDENNHGQIRLSGGAELFMRRASLKKEELVVHPANSPIANKNP
DNPKKITTLSYDVYKDKRESEDQYELHIPIAINKCPKNIFKINTEVRVLLKHDDNPYVIGIDRGERNLLYIVVVDGK
GNIVEQYSLNEIINNFNGIRIKTDYHSLLDKKEKERFEARQNWTSIENIKELKAGYISQVVHKICELVEKYDAVIAL
EDLNSGFKNSRVKVEKQVYQKFEKMLIDKLNYMVDKKSNPCATGGALKGYQITNKFESFKSMSTQNGFIFYIPAWLT
SKIDPSTGFVNLLKTKYTSIADSKKFISSFDRIMYVPEEDLFEFALDYKNFSRTDADYIKKWKLYSYGNRIRIFRNP
KKNNVEDWEEVCLTSAYKELENKYGINYQQGDIRALLCEQSDKAFYSSFMALMSLMLQMRNSITGRTDVDFLISPVK
NSDGIFYDSRNYEAQENAILPKNADANGAYNIARKVLWAIGQFKKAEDEKLDKVKIAISNKEWLEYAQTSVKH
APAPA
MVSKGEELFTGVVPILVELDGDVNGHKFSVSGEGEGDATYGKLTLKFICTTGKLPVPWPTLVTT
LTYGVQCFSRYPDHMKQHDFFKSAMPEGYVQERTIFFKDDGNYKTRAEVKFEGDTLVNRIELKGIDFKEDGNILGH
KLEYNYNSHNVYIMADKQKNGIKVNFKIRHNIEDGSVQLADHYQQNTPIGDGPVLLPDNHYLSTQSALSKDPNEKR
DHMVLLEFVTAAGITLGMDELYK
SEQ ID NO: 181
MSKLEKFTNCYSLSKTLRFKAIPVGKTQENIDNKRLLVEDEKRAEDYKGVKKLLDRYYLSFINDVLHSIKLKNLNNY
ISLFRKKTRTEKENKELENLEINLRKEIAKAFKGNEGYKSLFKKDIIETILPEFLDDKDEIALVNSENGETTAFTGE
FDNRENMESEEAKSTSIAFRCINENLTRYISNMDIFEKVDAIFDKHEVQEIKEKILNSDYDVEDFFEGEFFNEVLIQ
EGIDVYNAIIGGFVTESGEKIKGLNEYINLYNQKTKQKLPKFKPLYKQVLSDRESLSFYGEGYTSDEEVLEVERNTL
NKNSEIFSSIKKLEKLFKNFDEYSSAGIFVKNGPAISTISKDIFGEWNVIRDKWNAEYDDIHLKKKAVVTEKYEDDR
RKSFKKIGSFSLEQLQEYADADLSVVEKLKEIIIQKVDEIYKVYGSSEKLFDADFVLEKSLKKNDAVVAIMKDLLDS
VKSFENYIKAFFGEGKETNRDESFYGDFVLAYDILLKVDHIYDAIRNYVTQKPYSKDKFKLYFQNPQFMGGWDKDKE
TDYRATILRYGSKYYLAIMDKKYAKCLQKIDKDDVNGNYEKINYKLLPGPNKMLPKVFFSKKWMAYYNPSEDIQKIY
KNGTFKKGDMFNLNDCHKLIDFFKDSISRYPKWSNAYDENFSETEKYKDIAGFYREVEEQGYKVSFESASKKEVDKL
VEEGKLYMFQIYNKDFSDKSHGTPNLHTMYFKLLFDENNHGQIRLSGGAELFMRRASLKKEELVVHPANSPIANKNP
DNPKKITTLSYDVYKDKRESEDQYELHIPIAINKCPKNIFKINTEVRVLLKHDDNPYVIGIDRGERNLLYIVVVDGK
GNIVEQYSLNEIINNFNGIRIKTDYHSLLDKKEKERFEARQNWTSIENIKELKAGYISQVVHKICELVEKYDAVIAL
EDLNSGFKNSRVKVEKQVYQKFEKMLIDKLNYMVDKKSNPCATGGALKGYQITNKFESFKSMSTQNGFIFYIPAWLT
SKIDPSTGFVNLLKTKYTSIADSKKFISSFDRIMYVPEEDLFEFALDYKNFSRTDADYIKKWKLYSYGNRIRIFRNP
KKNNVEDWEEVCLTSAYKELENKYGINYQQGDIRALLCEQSDKAFYSSFMALMSLMLQMRNSITGRTDVDFLISPVK
NSDGIFYDSRNYEAQENAILPKNADANGAYNIARKVLWAIGQFKKAEDEKLDKVKIAISNKEWLEYAQTSVKH
APAPAPA
MVSKGEELFTGVVPILVELDGDVNGHKFSVSGEGEGDATYGKLTLKFICTTGKLPVPWPTLVTT
LTYGVQCFSRYPDHMKQHDFFKSAMPEGYVQERTIFFKDDGNYKTRAEVKFEGDTLVNRIELKGIDFKEDGNILGH
KLEYNYNSHNVYIMADKQKNGIKVNFKIRHNIEDGSVQLADHYQQNTPIGDGPVLLPDNHYLSTQSALSKDPNEKR
DHMVLLEFVTAAGITLGMDELYK
SEQ ID NO: 182
MSKLEKFTNCYSLSKTLRFKAIPVGKTQENIDNKRLLVEDEKRAEDYKGVKKLLDRYYLSFINDVLHSIKLKNLNNY
ISLFRKKTRTEKENKELENLEINLRKEIAKAFKGNEGYKSLFKKDIIETILPEFLDDKDEIALVNSENGETTAFTGE
FDNRENMESEEAKSTSIAFRCINENLTRYISNMDIFEKVDAIFDKHEVQEIKEKILNSDYDVEDFFEGEFFNEVLIQ
EGIDVYNAIIGGFVTESGEKIKGLNEYINLYNQKTKQKLPKFKPLYKQVLSDRESLSFYGEGYTSDEEVLEVERNTL
NKNSEIFSSIKKLEKLFKNFDEYSSAGIFVKNGPAISTISKDIFGEWNVIRDKWNAEYDDIHLKKKAVVTEKYEDDR
RKSFKKIGSFSLEQLQEYADADLSVVEKLKEIIIQKVDEIYKVYGSSEKLFDADFVLEKSLKKNDAVVAIMKDLLDS
VKSFENYIKAFFGEGKETNRDESFYGDFVLAYDILLKVDHIYDAIRNYVTQKPYSKDKFKLYFQNPQFMGGWDKDKE
TDYRATILRYGSKYYLAIMDKKYAKCLQKIDKDDVNGNYEKINYKLLPGPNKMLPKVFFSKKWMAYYNPSEDIQKIY
KNGTFKKGDMFNLNDCHKLIDFFKDSISRYPKWSNAYDENFSETEKYKDIAGFYREVEEQGYKVSFESASKKEVDKL
VEEGKLYMFQIYNKDFSDKSHGTPNLHTMYFKLLFDENNHGQIRLSGGAELFMRRASLKKEELVVHPANSPIANKNP
DNPKKITTLSYDVYKDKRESEDQYELHIPIAINKCPKNIFKINTEVRVLLKHDDNPYVIGIDRGERNLLYIVVVDGK
GNIVEQYSLNEIINNFNGIRIKTDYHSLLDKKEKERFEARQNWTSIENIKELKAGYISQVVHKICELVEKYDAVIAL
EDLNSGFKNSRVKVEKQVYQKFEKMLIDKLNYMVDKKSNPCATGGALKGYQITNKFESFKSMSTQNGFIFYIPAWLT
SKIDPSTGFVNLLKTKYTSIADSKKFISSFDRIMYVPEEDLFEFALDYKNFSRTDADYIKKWKLYSYGNRIRIFRNP
KKNNVEDWEEVCLTSAYKELENKYGINYQQGDIRALLCEQSDKAFYSSFMALMSLMLQMRNSITGRTDVDFLISPVK
NSDGIFYDSRNYEAQENAILPKNADANGAYNIARKVLWAIGQFKKAEDEKLDKVKIAISNKEWLEYAQTSVKH
APAPAPAPA
MVSKGEELFTGVVPILVELDGDVNGHKFSVSGEGEGDATYGKLTLKFICTTGKLPVPWPTLVTT
LTYGVQCFSRYPDHMKQHDFFKSAMPEGYVQERTIFFKDDGNYKTRAEVKFEGDTLVNRIELKGIDFKEDGNILGH
KLEYNYNSHNVYIMADKQKNGIKVNFKIRHNIEDGSVQLADHYQQNTPIGDGPVLLPDNHYLSTQSALSKDPNEKR
DHMVLLEFVTAAGITLGMDELYK
SEQ ID NO: 183
MSKLEKFTNCYSLSKTLRFKAIPVGKTQENIDNKRLLVEDEKRAEDYKGVKKLLDRYYLSFINDVLHSIKLKNLNNY
ISLFRKKTRTEKENKELENLEINLRKEIAKAFKGNEGYKSLFKKDIIETILPEFLDDKDEIALVNSENGETTAFTGE
FDNRENMESEEAKSTSIAFRCINENLTRYISNMDIFEKVDAIFDKHEVQEIKEKILNSDYDVEDFFEGEFFNEVLIQ
EGIDVYNAIIGGFVTESGEKIKGLNEYINLYNQKTKQKLPKFKPLYKQVLSDRESLSFYGEGYTSDEEVLEVERNTL
NKNSEIFSSIKKLEKLFKNFDEYSSAGIFVKNGPAISTISKDIFGEWNVIRDKWNAEYDDIHLKKKAVVTEKYEDDR
RKSFKKIGSFSLEQLQEYADADLSVVEKLKEIIIQKVDEIYKVYGSSEKLFDADFVLEKSLKKNDAVVAIMKDLLDS
VKSFENYIKAFFGEGKETNRDESFYGDFVLAYDILLKVDHIYDAIRNYVTQKPYSKDKFKLYFQNPQFMGGWDKDKE
TDYRATILRGSKYYLAIMDKKYAKCLQKIDKDDVNGNYEKINYKLLPGPNKMLPKVFFSKKWMAYYNPSEDIQKIY
KNGTFKKGDMFNLNDCHKLIDFFKDSISRYPKWSNAYDENFSETEKYKDIAGFYREVEEQGYKVSFESASKKEVDKL
VEEGKLYMFQIYNKDFSDKSHGTPNLHTMYFKLLFDENNHGQIRLSGGAELFMRRASLKKEELVVHPANSPIANKNP
DNPKKITTLSYDVYKDKRESEDQYELHIPIAINKCPKNIFKINTEVRVLLKHDDNPYVIGIDRGERNLLYIVVVDGK
GNIVEQYSLNEIINNFNGIRIKTDYHSLLDKKEKERFEARQNWTSIENIKELKAGYISQVVHKICELVEKYDAVIAL
EDLNSGFKNSRVKVEKQVYQKFEKMLIDKLNYMVDKKSNPCATGGALKGYQITNKFESFKSMSTQNGFIFYIPAWLT
SKIDPSTGFVNLLKTKYTSIADSKKFISSFDRIMYVPEEDLFEFALDYKNFSRTDADYIKKWKLYSYGNRIRIFRNP
KKNNVEDWEEVCLTSAYKELENKYGINYQQGDIRALLCEQSDKAFYSSFMALMSLMLQMRNSITGRTDVDFLISPVK
NSDGIFYDSRNYEAQENAILPKNADANGAYNIARKVLWAIGQFKKAEDEKLDKVKIAISNKEWLEYAQTSVKH
APAPAPAPAPA
MVSKGEELFTGVVPILVELDGDVNGHKFSVSGEGEGDATYGKLTLKFICTTGKLPVPWPTLVTT
LTYGVQCFSRYPDHMKQHDFFKSAMPEGYVQERTIFFKDDGNYKTRAEVKFEGDTLVNRIELKGIDFKEDGNILGH
KLEYNYNSHNVYIMADKQKNGIKVNFKIRHNIEDGSVQLADHYQQNTPIGDGPVLLPDNHYLSTQSALSKDPNEKR
DHMVLLEFVTAAGITLGMDELYK
SEQ ID NO: 184
MSKLEKFTNCYSLSKTLRFKAIPVGKTQENIDNKRLLVEDEKRAEDYKGVKKLLDRYYLSFINDVLHSIKLKNLNNY
ISLFRKKTRTEKENKELENLEINLRKEIAKAFKGNEGYKSLFKKDIIETILPEFLDDKDEIALVNSENGETTAFTGE
FDNRENMESEEAKSTSIAFRCINENLTRYISNMDIFEKVDAIFDKHEVQEIKEKILNSDYDVEDFFEGEFFNEVLIQ
EGIDVYNAIIGGFVTESGEKIKGLNEYINLYNQKTKQKLPKFKPLYKQVLSDRESLSFYGEGYTSDEEVLEVERNTL
NKNSEIFSSIKKLEKLFKNFDEYSSAGIFVKNGPAISTISKDIFGEWNVIRDKWNAEYDDIHLKKKAVVTEKYEDDR
RKSFKKIGSFSLEQLQEYADADLSVVEKLKEIIIQKVDEIYKVYGSSEKLFDADFVLEKSLKKNDAVVAIMKDLLDS
VKSFENYIKAFFGEGKETNRDESFYGDFVLAYDILLKVDHIYDAIRNYVTQKPYSKDKFKLYFQNPQFMGGWDKDKE
TDYRATILRYGSKYYLAIMDKKYAKCLQKIDKDDVNGNYEKINYKLLPGPNKMLPKVFFSKKWMAYYNPSEDIQKIY
KNGTFKKGDMFNLNDCHKLIDFFKDSISRYPKWSNAYDENFSETEKYKDIAGFYREVEEQGYKVSFESASKKEVDKL
VEEGKLYMFQIYNKDFSDKSHGTPNLHTMYFKLLFDENNHGQIRLSGGAELFMRRASLKKEELVVHPANSPIANKNP
DNPKKITTLSYDVYKDKRESEDQYELHIPIAINKCPKNIFKINTEVRVLLKHDDNPYVIGIDRGERNLLYIVVVDGK
GNIVEQYSLNEIINNFNGIRIKTDYHSLLDKKEKERFEARQNWTSIENIKELKAGYISQVVHKICELVEKYDAVIAL
EDLNSGFKNSRVKVEKQVYQKFEKMLIDKLNYMVDKKSNPCATGGALKGYQITNKFESFKSMSTQNGFIFYIPAWLT
SKIDPSTGFVNLLKTKYTSIADSKKFISSFDRIMYVPEEDLFEFALDYKNFSRTDADYIKKWKLYSYGNRIRIFRNP
KKNNVEDWEEVCLTSAYKELENKYGINYQQGDIRALLCEQSDKAFYSSFMALMSLMLQMRNSITGRTDVDFLISPVK
NSDGIFYDSRNYEAQENAILPKNADANGAYNIARKVLWAIGQFKKAEDEKLDKVKIAISNKEWLEYAQTSVKH
APAPAPAPAPAPA
MVSKGEELFTGVVPILVELDGDVNGHKFSVSGEGEGDATYGKLTLKFICTTGKLPVPWPTLVTT
LTYGVQCFSRYPDHMKQHDFFKSAMPEGYVQERTIFFKDDGNYKTRAEVKFEGDTLVNRIELKGIDFKEDGNILGH
KLEYNYNSHNVYIMADKQKNGIKVNFKIRHNIEDGSVQLADHYQQNTPIGDGPVLLPDNHYLSTQSALSKDPNEKR
DHMVLLEFVTAAGITLGMDELYK
SEQ ID NO: 185
MSKLEKFTNCYSLSKTLRFKAIPVGKTQENIDNKRLLVEDEKRAEDYKGVKKLLDRYYLSFINDVLHSIKLKNLNNY
ISLFRKKTRTEKENKELENLEINLRKEIAKAFKGNEGYKSLFKKDIIETILPEFLDDKDEIALVNSENGETTAFTGE
FDNRENMESEEAKSTSIAFRCINENLTRYISNMDIFEKVDAIFDKHEVQEIKEKILNSDYDVEDFFEGEFFNEVLIQ
EGIDVYNAIIGGFVTESGEKIKGLNEYINLYNQKTKQKLPKFKPLYKQVLSDRESLSFYGEGYTSDEEVLEVERNTL
NKNSEIFSSIKKLEKLFKNFDEYSSAGIFVKNGPAISTISKDIFGEWNVIRDKWNAEYDDIHLKKKAVVTEKYEDDR
RKSFKKIGSFSLEQLQEYADADLSVVEKLKEIIIQKVDEIYKVYGSSEKLFDADFVLEKSLKKNDAVVAIMKDLLDS
VKSFENYIKAFFGEGKETNRDESFYGDFVLAYDILLKVDHIYDAIRNYVTQKPYSKDKFKLYFQNPQFMGGWDKDKE
TDYRATILRYGSKYYLAIMDKKYAKCLQKIDKDDVNGNYEKINYKLLPGPNKMLPKVFFSKKWMAYYNPSEDIQKIY
KNGTFKKGDMFNLNDCHKLIDFFKDSISRYPKWSNAYDENFSETEKYKDIAGFYREVEEQGYKVSFESASKKEVDKL
VEEGKLYMFQIYNKDFSDKSHGTPNLHTMYFKLLFDENNHGQIRLSGGAELFMRRASLKKEELVVHPANSPIANKNP
DNPKKITTLSYDVYKDKRESEDQYELHIPIAINKCPKNIFKINTEVRVLLKHDDNPYVIGIDRGERNLLYIVVVDGK
GNIVEQYSLNEIINNFNGIRIKTDYHSLLDKKEKERFEARQNWTSIENIKELKAGYISQVVHKICELVEKYDAVIAL
EDLNSGFKNSRVKVEKQVYQKFEKMLIDKLNYMVDKKSNPCATGGALKGYQITNKFESFKSMSTQNGFIFYIPAWLT
SKIDPSTGFVNLLKTKYTSIADSKKFISSFDRIMYVPEEDLFEFALDYKNFSRTDADYIKKWKLYSYGNRIRIFRNP
KKNNVEDWEEVCLTSAYKELENKYGINYQQGDIRALLCEQSDKAFYSSFMALMSLMLQMRNSITGRTDVDFLISPVK
NSDGIFYDSRNYEAQENAILPKNADANGAYNIARKVLWAIGQFKKAEDEKLDKVKIAISNKEWLEYAQTSVKH
APAPAPAPAPAPAPA
MVSKGEELFTGVVPILVELDGDVNGHKFSVSGEGEGDATYGKLTLKFICTTGKLPVPWPTLVTT
LTYGVQCFSRYPDHMKQHDFFKSAMPEGYVQERTIFFKDDGNYKTRAEVKFEGDTLVNRIELKGIDFKEDGNILGH
KLEYNYNSHNVYIMADKQKNGIKVNFKIRHNIEDGSVQLADHYQQNTPIGDGPVLLPDNHYLSTQSALSKDPNEKR
DHMVLLEFVTAAGITLGMDELYK
SEQ ID NO: 186
MSKLEKFTNCYSLSKTLRFKAIPVGKTQENIDNKRLLVEDEKRAEDYKGVKKLLDRYYLSFINDVLHSIKLKNLNNY
ISLFRKKTRTEKENKELENLEINLRKEIAKAFKGNEGYKSLFKKDIIETILPEFLDDKDEIALVNSENGETTAFTGE
FDNRENMESEEAKSTSIAFRCINENLTRYISNMDIFEKVDAIFDKHEVQEIKEKILNSDYDVEDFFEGEFFNEVLIQ
EGIDVYNAIIGGFVTESGEKIKGLNEYINLYNQKTKQKLPKFKPLYKQVLSDRESLSFYGEGYTSDEEVLEVERNTL
NKNSEIFSSIKKLEKLFKNFDEYSSAGIFVKNGPAISTISKDIFGEWNVIRDKWNAEYDDIHLKKKAVVTEKYEDDR
RKSFKKIGSFSLEQLQEYADADLSVVEKLKEIIIQKVDEIYKVYGSSEKLFDADFVLEKSLKKNDAVVAIMKDLLDS
VKSFENYIKAFFGEGKETNRDESFYGDFVLAYDILLKVDHIYDAIRNYVTQKPYSKDKFKLYFQNPQFMGGWDKDKE
TDYRATILRYGSKYYLAIMDKKYAKCLQKIDKDDVNGNYEKINYKLLPGPNKMLPKVFFSKKWMAYYNPSEDIQKIY
KNGTFKKGDMFNLNDCHKLIDFFKDSISRYPKWSNAYDENFSETEKYKDIAGFYREVEEQGYKVSFESASKKEVDKL
VEEGKLYMFQIYNKDFSDKSHGTPNLHTMYFKLLFDENNHGQIRLSGGAELFMRRASLKKEELVVHPANSPIANKNP
DNPKKITTLSYDVYKDKRESEDQYELHIPIAINKCPKNIFKINTEVRVLLKHDDNPYVIGIDRGERNLLYIVVVDGK
GNIVEQYSLNEIINNFNGIRIKTDYHSLLDKKEKERFEARQNWTSIENIKELKAGYISQVVHKICELVEKYDAVIAL
EDLNSGFKNSRVKVEKQVYQKFEKMLIDKLNYMVDKKSNPCATGGALKGYQITNKFESFKSMSTQNGFIFYIPAWLT
SKIDPSTGFVNLLKTKYTSIADSKKFISSFDRIMYVPEEDLFEFALDYKNFSRTDADYIKKWKLYSYGNRIRIFRNP
KKNNVEDWEEVCLTSAYKELENKYGINYQQGDIRALLCEQSDKAFYSSFMALMSLMLQMRNSITGRTDVDFLISPVK
NSDGIFYDSRNYEAQENAILPKNADANGAYNIARKVLWAIGQFKKAEDEKLDKVKIAISNKEWLEYAQTSVKH
APAPAPAPAPAPAPAPA
MVSKGEELFTGVVPILVELDGDVNGHKFSVSGEGEGDATYGKLTLKFICTTGKLPVPWPTLVTT
LTYGVQCFSRYPDHMKQHDFFKSAMPEGYVQERTIFFKDDGNYKTRAEVKFEGDTLVNRIELKGIDFKEDGNILGH
KLEYNYNSHNVYIMADKQKNGIKVNFKIRHNIEDGSVQLADHYQQNTPIGDGPVLLPDNHYLSTQSALSKDPNEKR
DHMVLLEFVTAAGITLGMDELYK
SEQ ID NO: 187
MSKLEKFTNCYSLSKTLRFKAIPVGKTQENIDNKRLLVEDEKRAEDYKGVKKLLDRYYLSFINDVLHSIKLKNLNNY
ISLFRKKTRTEKENKELENLEINLRKEIAKAFKGNEGYKSLFKKDIIETILPEFLDDKDEIALVNSENGETTAFTGE
FDNRENMESEEAKSTSIAFRCINENLTRYISNMDIFEKVDAIFDKHEVQEIKEKILNSDYDVEDFFEGEFFNEVLIQ
EGIDVYNAIIGGFVTESGEKIKGLNEYINLYNQKTKQKLPKFKPLYKQVLSDRESLSFYGEGYTSDEEVLEVERNTL
NKNSEIFSSIKKLEKLFKNFDEYSSAGIFVKNGPAISTISKDIFGEWNVIRDKWNAEYDDIHLKKKAVVTEKYEDDR
RKSFKKIGSFSLEQLQEYADADLSVVEKLKEIIIQKVDEIYKVYGSSEKLFDADFVLEKSLKKNDAVVAIMKDLLDS
VKSFENYIKAFFGEGKETNRDESFYGDFVLAYDILLKVDHIYDAIRNYVTQKPYSKDKFKLYFQNPQFMGGWDKDKE
TDYRATILRYGSKYYLAIMDKKYAKCLQKIDKDDVNGNYEKINYKLLPGPNKMLPKVFFSKKWMAYYNPSEDIQKIY
KNGTFKKGDMFNLNDCHKLIDFFKDSISRYPKWSNAYDENFSETEKYKDIAGFYREVEEQGYKVSFESASKKEVDKL
VEEGKLYMFQIYNKDFSDKSHGTPNLHTMYFKLLFDENNHGQIRLSGGAELFMRRASLKKEELVVHPANSPIANKNP
DNPKKITTLSYDVYKDKRESEDQYELHIPIAINKCPKNIFKINTEVRVLLKHDDNPYVIGIDRGERNLLYIVVVDGK
GNIVEQYSLNEIINNFNGIRIKTDYHSLLDKKEKERFEARQNWTSIENIKELKAGYISQVVHKICELVEKYDAVIAL
EDLNSGFKNSRVKVEKQVYQKFEKMLIDKLNYMVDKKSNPCATGGALKGYQITNKFESFKSMSTQNGFIFYIPAWLT
SKIDPSTGFVNLLKTKYTSIADSKKFISSFDRIMYVPEEDLFEFALDYKNFSRTDADYIKKWKLYSYGNRIRIFRNP
KKNNVEDWEEVCLTSAYKELENKYGINYQQGDIRALLCEQSDKAFYSSFMALMSLMLQMRNSITGRTDVDFLISPVK
NSDGIFYDSRNYEAQENAILPKNADANGAYNIARKVLWAIGQFKKAEDEKLDKVKIAISNKEWLEYAQTSVKH
APAPAPAPAPAPAPAPAPA
MVSKGEELFTGVVPILVELDGDVNGHKFSVSGEGEGDATYGKLTLKFICTTGKLPVPWPTLVTT
LTYGVQCFSRYPDHMKQHDFFKSAMPEGYVQERTIFFKDDGNYKTRAEVKFEGDTLVNRIELKGIDFKEDGNILGH
KLEYNYNSHNVYIMADKQKNGIKVNFKIRHNIEDGSVQLADHYQQNTPIGDGPVLLPDNHYLSTQSALSKDPNEKR
DHMVLLEFVTAAGITLGMDELYK
SEQ ID NO: 188
MTQFEGFTNLYQVSKTLRFELIPQGKTLKHIQEQGFIEEDKARNDHYKELKPIIDRIYKTYADQCLQLVQLDWENLS
MSKLEKFTNCYSLSKTLRFKAIPVGKTQENIDNKRLLVEDEKRAEDYKGVKKLLDRYYLSFINDVLHSIKLKNLNNY
ISLFRKKTRTEKENKELENLEINLRKEIAKAFKGNEGYKSLFKKDIIETILPEFLDDKDEIALVNSENGETTAFTGE
FDNRENMESEEAKSTSIAFRCINENLTRYISNMDIFEKVDAIFDKHEVQEIKEKILNSDYDVEDFFEGEFFNEVLIQ
EGIDVYNAIIGGFVTESGEKIKGLNEYINLYNQKTKQKLPKFKPLYKQVLSDRESLSFYGEGYTSDEEVLEVERNTL
NKNSEIFSSIKKLEKLFKNFDEYSSAGIFVKNGPAISTISKDIFGEWNVIRDKWNAEYDDIHLKKKAVVTEKYEDDR
RKSFKKIGSFSLEQLQEYADADLSVVEKLKEIIIQKVDEIYKVYGSSEKLFDADFVLEKSLKKNDAVVAIMKDLLDS
VKSFENYIKAFFGEGKETNRDESFYGDFVLAYDILLKVDHIYDAIRNYVTQKPYSKDKFKLYFQNPQFMGGWDKDKE
TDYRATILRYGSKYYLAIMDKKYAKCLQKIDKDDVNGNYEKINYKLLPGPNKMLPKVFFSKKWMAYYNPSEDIQKIY
KNGTFKKGDMFNLNDCHKLIDFFKDSISRYPKWSNAYDENFSETEKYKDIAGFYREVEEQGYKVSFESASKKEVDKL
VEEGKLYMFQIYNKDFSDKSHGTPNLHTMYFKLLFDENNHGQIRLSGGAELFMRRASLKKEELVVHPANSPIANKNP
DNPKKITTLSYDVYKDKRESEDQYELHIPIAINKCPKNIFKINTEVRVLLKHDDNPYVIGIDRGERNLLYIVVVDGK
GNIVEQYSLNEIINNFNGIRIKTDYHSLLDKKEKERFEARQNWTSIENIKELKAGYISQVVHKICELVEKYDAVIAL
EDLNSGFKNSRVKVEKQVYQKFEKMLIDKLNYMVDKKSNPCATGGALKGYQITNKFESFKSMSTQNGFIFYIPAWLT
SKIDPSTGFVNLLKTKYTSIADSKKFISSFDRIMYVPEEDLFEFALDYKNFSRTDADYIKKWKLYSYGNRIRIFRNP
KKNNVEDWEEVCLTSAYKELENKYGINYQQGDIRALLCEQSDKAFYSSFMALMSLMLQMRNSITGRTDVDFLISPVK
NSDGIFYDSRNYEAQENAILPKNADANGAYNIARKVLWAIGQFKKAEDEKLDKVKIAISNKEWLEYAQTSVKH
APAPAPAPAPAPAPAPAPAPA
MVSKGEELFTGVVPILVELDGDVNGHKFSVSGEGEGDATYGKLTLKFICTTGKLPVPWPTLVTT
LTYGVQCFSRYPDHMKQHDFFKSAMPEGYVQERTIFFKDDGNYKTRAEVKFEGDTLVNRIELKGIDFKEDGNILGH
KLEYNYNSHNVYIMADKQKNGIKVNFKIRHNIEDGSVQLADHYQQNTPIGDGPVLLPDNHYLSTQSALSKDPNEKR
DHMVLLEFVTAAGITLGMDELYK
SEQ ID NO: 189
MSKLEKFTNCYSLSKTLRFKAIPVGKTQENIDNKRLLVEDEKRAEDYKGVKKLLDRYYLSFINDVLHSIKLKNLNNY
ISLFRKKTRTEKENKELENLEINLRKEIAKAFKGNEGYKSLFKKDIIETILPEFLDDKDEIALVNSENGETTAFTGE
FDNRENMESEEAKSTSIAFRCINENLTRYISNMDIFEKVDAIFDKHEVQEIKEKILNSDYDVEDFFEGEFFNEVLIQ
EGIDVYNAIIGGFVTESGEKIKGLNEYINLYNQKTKQKLPKFKPLYKQVLSDRESLSFYGEGYTSDEEVLEVERNTL
NKNSEIFSSIKKLEKLFKNFDEYSSAGIFVKNGPAISTISKDIFGEWNVIRDKWNAEYDDIHLKKKAVVTEKYEDDR
RKSFKKIGSFSLEQLQEYADADLSVVEKLKEIIIQKVDEIYKVYGSSEKLFDADFVLEKSLKKNDAVVAIMKDLLDS
VKSFENYIKAFFGEGKETNRDESFYGDFVLAYDILLKVDHIYDAIRNYVTQKPYSKDKFKLYFQNPQFMGGWDKDKE
TDYRATILRYGSKYYLAIMDKKYAKCLQKIDKDDVNGNYEKINYKLLPGPNKMLPKVFFSKKWMAYYNPSEDIQKIY
KNGTFKKGDMFNLNDCHKLIDFFKDSISRYPKWSNAYDENFSETEKYKDIAGFYREVEEQGYKVSFESASKKEVDKL
VEEGKLYMFQIYNKDFSDKSHGTPNLHTMYFKLLFDENNHGQIRLSGGAELFMRRASLKKEELVVHPANSPIANKNP
DNPKKITTLSYDVYKDKRESEDQYELHIPIAINKCPKNIFKINTEVRVLLKHDDNPYVIGIDRGERNLLYIVVVDGK
GNIVEQYSLNEIINNFNGIRIKTDYHSLLDKKEKERFEARQNWTSIENIKELKAGYISQVVHKICELVEKYDAVIAL
EDLNSGFKNSRVKVEKQVYQKFEKMLIDKLNYMVDKKSNPCATGGALKGYQITNKFESFKSMSTQNGFIFYIPAWLT
SKIDPSTGFVNLLKTKYTSIADSKKFISSFDRIMYVPEEDLFEFALDYKNFSRTDADYIKKWKLYSYGNRIRIFRNP
KKNNVEDWEEVCLTSAYKELENKYGINYQQGDIRALLCEQSDKAFYSSFMALMSLMLQMRNSITGRTDVDFLISPVK
NSDGIFYDSRNYEAQENAILPKNADANGAYNIARKVLWAIGQFKKAEDEKLDKVKIAISNKEWLEYAQTSVKH
APAPAPAPAPAPAPAPAPAPAPA
MVSKGEELFTGVVPILVELDGDVNGHKFSVSGEGEGDATYGKLTLKFICTTGKLPVPWPTLVTT
LTYGVQCFSRYPDHMKQHDFFKSAMPEGYVQERTIFFKDDGNYKTRAEVKFEGDTLVNRIELKGIDFKEDGNILGH
KLEYNYNSHNVYIMADKQKNGIKVNFKIRHNIEDGSVQLADHYQQNTPIGDGPVLLPDNHYLSTQSALSKDPNEKR
DHMVLLEFVTAAGITLGMDELYK
SEQ ID NO: 190
MSKLEKFTNCYSLSKTLRFKAIPVGKTQENIDNKRLLVEDEKRAEDYKGVKKLLDRYYLSFINDVLHSIKLKNLNNY
ISLFRKKTRTEKENKELENLEINLRKEIAKAFKGNEGYKSLFKKDIIETILPEFLDDKDEIALVNSENGETTAFTGE
FDNRENMESEEAKSTSIAFRCINENLTRYISNMDIFEKVDAIFDKHEVQEIKEKILNSDYDVEDFFEGEFFNEVLIQ
EGIDVYNAIIGGFVTESGEKIKGLNEYINLYNQKTKQKLPKFKPLYKQVLSDRESLSFYGEGYTSDEEVLEVERNTL
NKNSEIFSSIKKLEKLFKNFDEYSSAGIFVKNGPAISTISKDIFGEWNVIRDKWNAEYDDIHLKKKAVVTEKYEDDR
RKSFKKIGSFSLEQLQEYADADLSVVEKLKEIIIQKVDEIYKVYGSSEKLFDADFVLEKSLKKNDAVVAIMKDLLDS
VKSFENYIKAFFGEGKETNRDESFYGDFVLAYDILLKVDHIYDAIRNYVTQKPYSKDKFKLYFQNPQFMGGWDKDKE
TDYRATILRYGSKYYLAIMDKKYAKCLQKIDKDDVNGNYEKINYKLLPGPNKMLPKVFFSKKWMAYYNPSEDIQKIY
KNGTFKKGDMFNLNDCHKLIDFFKDSISRYPKWSNAYDENFSETEKYKDIAGFYREVEEQGYKVSFESASKKEVDKL
VEEGKLYMFQIYNKDFSDKSHGTPNLHTMYFKLLFDENNHGQIRLSGGAELFMRRASLKKEELVVHPANSPIANKNP
DNPKKITTLSYDVYKDKRESEDQYELHIPIAINKCPKNIFKINTEVRVLLKHDDNPYVIGIDRGERNLLYIVVVDGK
GNIVEQYSLNEIINNFNGIRIKTDYHSLLDKKEKERFEARQNWTSIENIKELKAGYISQVVHKICELVEKYDAVIAL
EDLNSGFKNSRVKVEKQVYQKFEKMLIDKLNYMVDKKSNPCATGGALKGYQITNKFESFKSMSTQNGFIFYIPAWLT
SKIDPSTGFVNLLKTKYTSIADSKKFISSFDRIMYVPEEDLFEFALDYKNFSRTDADYIKKWKLYSYGNRIRIFRNP
KKNNVEDWEEVCLTSAYKELENKYGINYQQGDIRALLCEQSDKAFYSSFMALMSLMLQMRNSITGRTDVDFLISPVK
NSDGIFYDSRNYEAQENAILPKNADANGAYNIARKVLWAIGQFKKAEDEKLDKVKIAISNKEWLEYAQTSVKH
APAPAPAPAPAPAPAPAPAPAPAPA
MVSKGEELFTGVVPILVELDGDVNGHKFSVSGEGEGDATYGKLTLKFICTTGKLPVPWPTLVTT
LTYGVQCFSRYPDHMKQHDFFKSAMPEGYVQERTIFFKDDGNYKTRAEVKFEGDTLVNRIELKGIDFKEDGNILGH
KLEYNYNSHNVYIMADKQKNGIKVNFKIRHNIEDGSVQLADHYQQNTPIGDGPVLLPDNHYLSTQSALSKDPNEKR
DHMVLLEFVTAAGITLGMDELYK
SEQ ID NO: 191
MSKLEKFTNCYSLSKTLRFKAIPVGKTQENIDNKRLLVEDEKRAEDYKGVKKLLDRYYLSFINDVLHSIKLKNLNNY
ISLFRKKTRTEKENKELENLEINLRKEIAKAFKGNEGYKSLFKKDIIETILPEFLDDKDEIALVNSENGETTAFTGE
FDNRENMESEEAKSTSIAFRCINENLTRYISNMDIFEKVDAIFDKHEVQEIKEKILNSDYDVEDFFEGEFFNEVLIQ
EGIDVYNAIIGGFVTESGEKIKGLNEYINLYNQKTKQKLPKFKPLYKQVLSDRESLSFYGEGYTSDEEVLEVERNTL
NKNSEIFSSIKKLEKLFKNFDEYSSAGIFVKNGPAISTISKDIFGEWNVIRDKWNAEYDDIHLKKKAVVTEKYEDDR
RKSFKKIGSFSLEQLQEYADADLSVVEKLKEIIIQKVDEIYKVYGSSEKLFDADFVLEKSLKKNDAVVAIMKDLLDS
VKSFENYIKAFFGEGKETNRDESFYGDFVLAYDILLKVDHIYDAIRNYVTQKPYSKDKFKLYFQNPQFMGGWDKDKE
TDYRATILRYGSKYYLAIMDKKYAKCLQKIDKDDVNGNYEKINYKLLPGPNKMLPKVFFSKKWMAYYNPSEDIQKIY
KNGTFKKGDMFNLNDCHKLIDFFKDSISRYPKWSNAYDENFSETEKYKDIAGFYREVEEQGYKVSFESASKKEVDKL
VEEGKLYMFQIYNKDFSDKSHGTPNLHTMYFKLLFDENNHGQIRLSGGAELFMRRASLKKEELVVHPANSPIANKNP
DNPKKITTLSYDVYKDKRESEDQYELHIPIAINKCPKNIFKINTEVRVLLKHDDNPYVIGIDRGERNLLYIVVVDGK
GNIVEQYSLNEIINNFNGIRIKTDYHSLLDKKEKERFEARQNWTSIENIKELKAGYISQVVHKICELVEKYDAVIAL
EDLNSGFKNSRVKVEKQVYQKFEKMLIDKLNYMVDKKSNPCATGGALKGYQITNKFESFKSMSTQNGFIFYIPAWLT
SKIDPSTGFVNLLKTKYTSIADSKKFISSFDRIMYVPEEDLFEFALDYKNFSRTDADYIKKWKLYSYGNRIRIFRNP
KKNNVEDWEEVCLTSAYKELENKYGINYQQGDIRALLCEQSDKAFYSSFMALMSLMLQMRNSITGRTDVDFLISPVK
NSDGIFYDSRNYEAQENAILPKNADANGAYNIARKVLWAIGQFKKAEDEKLDKVKIAISNKEWLEYAQTSVKH
APAPAPAPAPAPAPAPAPAPAPAPAPA
MVSKGEELFTGVVPILVELDGDVNGHKFSVSGEGEGDATYGKLTLKFICTTGKLPVPWPTLVTT
LTYGVQCFSRYPDHMKQHDFFKSAMPEGYVQERTIFFKDDGNYKTRAEVKFEGDTLVNRIELKGIDFKEDGNILGH
KLEYNYNSHNVYIMADKQKNGIKVNFKIRHNIEDGSVQLADHYQQNTPIGDGPVLLPDNHYLSTQSALSKDPNEKR
DHMVLLEFVTAAGITLGMDELYK
SEQ ID NO: 192
MSKLEKFTNCYSLSKTLRFKAIPVGKTQENIDNKRLLVEDEKRAEDYKGVKKLLDRYYLSFINDVLHSIKLKNLNNY
ISLFRKKTRTEKENKELENLEINLRKEIAKAFKGNEGYKSLFKKDIIETILPEFLDDKDEIALVNSENGETTAFTGE
FDNRENMESEEAKSTSIAFRCINENLTRYISNMDIFEKVDAIFDKHEVQEIKEKILNSDYDVEDFFEGEFFNEVLIQ
EGIDVYNAIIGGFVTESGEKIKGLNEYINLYNQKTKQKLPKFKPLYKQVLSDRESLSFYGEGYTSDEEVLEVERNTL
NKNSEIFSSIKKLEKLFKNFDEYSSAGIFVKNGPAISTISKDIFGEWNVIRDKWNAEYDDIHLKKKAVVTEKYEDDR
RKSFKKIGSFSLEQLQEYADADLSVVEKLKEIIIQKVDEIYKVYGSSEKLFDADFVLEKSLKKNDAVVAIMKDLLDS
VKSFENYIKAFFGEGKETNRDESFYGDFVLAYDILLKVDHIYDAIRNYVTQKPYSKDKFKLYFQNPQFMGGWDKDKE
TDYRATILRYGSKYYLAIMDKKYAKCLQKIDKDDVNGNYEKINYKLLPGPNKMLPKVFFSKKWMAYYNPSEDIQKIY
KNGTFKKGDMFNLNDCHKLIDFFKDSISRYPKWSNAYDENFSETEKYKDIAGFYREVEEQGYKVSFESASKKEVDKL
VEEGKLYMFQIYNKDFSDKSHGTPNLHTMYFKLLFDENNHGQIRLSGGAELFMRRASLKKEELVVHPANSPIANKNP
DNPKKITTLSYDVYKDKRESEDQYELHIPIAINKCPKNIFKINTEVRVLLKHDDNPYVIGIDRGERNLLYIVVVDGK
GNIVEQYSLNEIINNFNGIRIKTDYHSLLDKKEKERFEARQNWTSIENIKELKAGYISQVVHKICELVEKYDAVIAL
EDLNSGFKNSRVKVEKQVYQKFEKMLIDKLNYMVDKKSNPCATGGALKGYQITNKFESFKSMSTQNGFIFYIPAWLT
SKIDPSTGFVNLLKTKYTSIADSKKFISSFDRIMYVPEEDLFEFALDYKNFSRTDADYIKKWKLYSYGNRIRIFRNP
KKNNVEDWEEVCLTSAYKELENKYGINYQQGDIRALLCEQSDKAFYSSFMALMSLMLQMRNSITGRTDVDFLISPVK
NSDGIFYDSRNYEAQENAILPKNADANGAYNIARKVLWAIGQFKKAEDEKLDKVKIAISNKEWLEYAQTSVKH
APAPAPAPAPAPAPAPAPAPAPAPAPAPA
MVSKGEELFTGVVPILVELDGDVNGHKFSVSGEGEGDATYGKLTLKFICTTGKLPVPWPTLVTT
LTYGVQCFSRYPDHMKQHDFFKSAMPEGYVQERTIFFKDDGNYKTRAEVKFEGDTLVNRIELKGIDFKEDGNILGH
KLEYNYNSHNVYIMADKQKNGIKVNFKIRHNIEDGSVQLADHYQQNTPIGDGPVLLPDNHYLSTQSALSKDPNEKR
DHMVLLEFVTAAGITLGMDELYK
SEQ ID NO: 193
MSKLEKFTNCYSLSKTLRFKAIPVGKTQENIDNKRLLVEDEKRAEDYKGVKKLLDRYYLSFINDVLHSIKLKNLNNY
ISLFRKKTRTEKENKELENLEINLRKEIAKAFKGNEGYKSLFKKDIIETILPEFLDDKDEIALVNSENGETTAFTGE
FDNRENMESEEAKSTSIAFRCINENLTRYISNMDIFEKVDAIFDKHEVQEIKEKILNSDYDVEDFFEGEFFNEVLIQ
EGIDVYNAIIGGFVTESGEKIKGLNEYINLYNQKTKQKLPKFKPLYKQVLSDRESLSFYGEGYTSDEEVLEVERNTL
NKNSEIFSSIKKLEKLFKNFDEYSSAGIFVKNGPAISTISKDIFGEWNVIRDKWNAEYDDIHLKKKAVVTEKYEDDR
RKSFKKIGSFSLEQLQEYADADLSVVEKLKEIIIQKVDEIYKVYGSSEKLFDADFVLEKSLKKNDAVVAIMKDLLDS
VKSFENYIKAFFGEGKETNRDESFYGDFVLAYDILLKVDHIYDAIRNYVTQKPYSKDKFKLYFQNPQFMGGWDKDKE
TDYRATILRYGSKYYLAIMDKKYAKCLQKIDKDDVNGNYEKINYKLLPGPNKMLPKVFFSKKWMAYYNPSEDIQKIY
KNGTFKKGDMFNLNDCHKLIDFFKDSISRYPKWSNAYDENFSETEKYKDIAGFYREVEEQGYKVSFESASKKEVDKL
VEEGKLYMFQIYNKDFSDKSHGTPNLHTMYFKLLFDENNHGQIRLSGGAELFMRRASLKKEELVVHPANSPIANKNP
DNPKKITTLSYDVYKDKRESEDQYELHIPIAINKCPKNIFKINTEVRVLLKHDDNPYVIGIDRGERNLLYIVVVDGK
GNIVEQYSLNEIINNFNGIRIKTDYHSLLDKKEKERFEARQNWTSIENIKELKAGYISQVVHKICELVEKYDAVIAL
EDLNSGFKNSRVKVEKQVYQKFEKMLIDKLNYMVDKKSNPCATGGALKGYQITNKFESFKSMSTQNGFIFYIPAWLT
SKIDPSTGFVNLLKTKYTSIADSKKFISSFDRIMYVPEEDLFEFALDYKNFSRTDADYIKKWKLYSYGNRIRIFRNP
KKNNVEDWEEVCLTSAYKELENKYGINYQQGDIRALLCEQSDKAFYSSFMALMSLMLQMRNSITGRTDVDFLISPVK
NSDGIFYDSRNYEAQENAILPKNADANGAYNIARKVLWAIGQFKKAEDEKLDKVKIAISNKEWLEYAQTSVKH
XP
MVSKGEELFTGVVPILVELDGDVNGHKFSVSGEGEGDATYGKLTLKFICTTGKLPVPWPTLVTT
LTYGVQCFSRYPDHMKQHDFFKSAMPEGYVQERTIFFKDDGNYKTRAEVKFEGDTLVNRIELKGIDFKEDGNILGH
KLEYNYNSHNVYIMADKQKNGIKVNFKIRHNIEDGSVQLADHYQQNTPIGDGPVLLPDNHYLSTQSALSKDPNEKR
DHMVLLEFVTAAGITLGMDELYK
SEQ ID NO: 194
MSKLEKFTNCYSLSKTLRFKAIPVGKTQENIDNKRLLVEDEKRAEDYKGVKKLLDRYYLSFINDVLHSIKLKNLNNY
ISLFRKKTRTEKENKELENLEINLRKEIAKAFKGNEGYKSLFKKDIIETILPEFLDDKDEIALVNSENGETTAFTGE
FDNRENMESEEAKSTSIAFRCINENLTRYISNMDIFEKVDAIFDKHEVQEIKEKILNSDYDVEDFFEGEFFNEVLIQ
EGIDVYNAIIGGFVTESGEKIKGLNEYINLYNQKTKQKLPKFKPLYKQVLSDRESLSFYGEGYTSDEEVLEVERNTL
NKNSEIFSSIKKLEKLFKNFDEYSSAGIFVKNGPAISTISKDIFGEWNVIRDKWNAEYDDIHLKKKAVVTEKYEDDR
RKSFKKIGSFSLEQLQEYADADLSVVEKLKEIIIQKVDEIYKVYGSSEKLFDADFVLEKSLKKNDAVVAIMKDLLDS
VKSFENYIKAFFGEGKETNRDESFYGDFVLAYDILLKVDHIYDAIRNYVTQKPYSKDKFKLYFQNPQFMGGWDKDKE
TDYRATILRYGSKYYLAIMDKKYAKCLQKIDKDDVNGNYEKINYKLLPGPNKMLPKVFFSKKWMAYYNPSEDIQKIY
KNGTFKKGDMFNLNDCHKLIDFFKDSISRYPKWSNAYDENFSETEKYKDIAGFYREVEEQGYKVSFESASKKEVDKL
VEEGKLYMFQIYNKDFSDKSHGTPNLHTMYFKLLFDENNHGQIRLSGGAELFMRRASLKKEELVVHPANSPIANKNP
DNPKKITTLSYDVYKDKRESEDQYELHIPIAINKCPKNIFKINTEVRVLLKHDDNPYVIGIDRGERNLLYIVVVDGK
GNIVEQYSLNEIINNFNGIRIKTDYHSLLDKKEKERFEARQNWTSIENIKELKAGYISQVVHKICELVEKYDAVIAL
EDLNSGFKNSRVKVEKQVYQKFEKMLIDKLNYMVDKKSNPCATGGALKGYQITNKFESFKSMSTQNGFIFYIPAWLT
SKIDPSTGFVNLLKTKYTSIADSKKFISSFDRIMYVPEEDLFEFALDYKNFSRTDADYIKKWKLYSYGNRIRIFRNP
KKNNVEDWEEVCLTSAYKELENKYGINYQQGDIRALLCEQSDKAFYSSFMALMSLMLQMRNSITGRTDVDFLISPVK
NSDGIFYDSRNYEAQENAILPKNADANGAYNIARKVLWAIGQFKKAEDEKLDKVKIAISNKEWLEYAQTSVKH
XPXP
MVSKGEELFTGVVPILVELDGDVNGHKFSVSGEGEGDATYGKLTLKFICTTGKLPVPWPTLVTT
LTYGVQCFSRYPDHMKQHDFFKSAMPEGYVQERTIFFKDDGNYKTRAEVKFEGDTLVNRIELKGIDFKEDGNILGH
KLEYNYNSHNVYIMADKQKNGIKVNFKIRHNIEDGSVQLADHYQQNTPIGDGPVLLPDNHYLSTQSALSKDPNEKR
DHMVLLEFVTAAGITLGMDELYK
SEQ ID NO: 195
MSKLEKFTNCYSLSKTLRFKAIPVGKTQENIDNKRLLVEDEKRAEDYKGVKKLLDRYYLSFINDVLHSIKLKNLNNY
ISLFRKKTRTEKENKELENLEINLRKEIAKAFKGNEGYKSLFKKDIIETILPEFLDDKDEIALVNSENGETTAFTGE
FDNRENMESEEAKSTSIAFRCINENLTRYISNMDIFEKVDAIFDKHEVQEIKEKILNSDYDVEDFFEGEFFNEVLIQ
EGIDVYNAIIGGFVTESGEKIKGLNEYINLYNQKTKQKLPKFKPLYKQVLSDRESLSFYGEGYTSDEEVLEVERNTL
NKNSEIFSSIKKLEKLFKNFDEYSSAGIFVKNGPAISTISKDIFGEWNVIRDKWNAEYDDIHLKKKAVVTEKYEDDR
RKSFKKIGSFSLEQLQEYADADLSVVEKLKEIIIQKVDEIYKVYGSSEKLFDADFVLEKSLKKNDAVVAIMKDLLDS
VKSFENYIKAFFGEGKETNRDESFYGDFVLAYDILLKVDHIYDAIRNYVTQKPYSKDKFKLYFQNPQFMGGWDKDKE
TDYRATILRYGSKYYLAIMDKKYAKCLQKIDKDDVNGNYEKINYKLLPGPNKMLPKVFFSKKWMAYYNPSEDIQKIY
KNGTFKKGDMFNLNDCHKLIDFFKDSISRYPKWSNAYDENFSETEKYKDIAGFYREVEEQGYKVSFESASKKEVDKL
VEEGKLYMFQIYNKDFSDKSHGTPNLHTMYFKLLFDENNHGQIRLSGGAELFMRRASLKKEELVVHPANSPIANKNP
DNPKKITTLSYDVYKDKRESEDQYELHIPIAINKCPKNIFKINTEVRVLLKHDDNPYVIGIDRGERNLLYIVVVDGK
GNIVEQYSLNEIINNFNGIRIKTDYHSLLDKKEKERFEARQNWTSIENIKELKAGYISQVVHKICELVEKYDAVIAL
EDLNSGFKNSRVKVEKQVYQKFEKMLIDKLNYMVDKKSNPCATGGALKGYQITNKFESFKSMSTQNGFIFYIPAWLT
SKIDPSTGFVNLLKTKYTSIADSKKFISSFDRIMYVPEEDLFEFALDYKNFSRTDADYIKKWKLYSYGNRIRIFRNP
KKNNVEDWEEVCLTSAYKELENKYGINYQQGDIRALLCEQSDKAFYSSFMALMSLMLQMRNSITGRTDVDFLISPVK
NSDGIFYDSRNYEAQENAILPKNADANGAYNIARKVLWAIGQFKKAEDEKLDKVKIAISNKEWLEYAQTSVKH
XPXPXP
MVSKGEELFTGVVPILVELDGDVNGHKFSVSGEGEGDATYGKLTLKFICTTGKLPVPWPTLVTT
LTYGVQCFSRYPDHMKQHDFFKSAMPEGYVQERTIFFKDDGNYKTRAEVKFEGDTLVNRIELKGIDFKEDGNILGH
KLEYNYNSHNVYIMADKQKNGIKVNFKIRHNIEDGSVQLADHYQQNTPIGDGPVLLPDNHYLSTQSALSKDPNEKR
DHMVLLEFVTAAGITLGMDELYK
SEQ ID NO: 196
MSKLEKFTNCYSLSKTLRFKAIPVGKTQENIDNKRLLVEDEKRAEDYKGVKKLLDRYYLSFINDVLHSIKLKNLNNY
ISLFRKKTRTEKENKELENLEINLRKEIAKAFKGNEGYKSLFKKDIIETILPEFLDDKDEIALVNSENGETTAFTGE
FDNRENMESEEAKSTSIAFRCINENLTRYISNMDIFEKVDAIFDKHEVQEIKEKILNSDYDVEDFFEGEFFNEVLIQ
EGIDVYNAIIGGFVTESGEKIKGLNEYINLYNQKTKQKLPKFKPLYKQVLSDRESLSFYGEGYTSDEEVLEVERNTL
NKNSEIFSSIKKLEKLFKNFDEYSSAGIFVKNGPAISTISKDIFGEWNVIRDKWNAEYDDIHLKKKAVVTEKYEDDR
RKSFKKIGSFSLEQLQEYADADLSVVEKLKEIIIQKVDEIYKVYGSSEKLFDADFVLEKSLKKNDAVVAIMKDLLDS
VKSFENYIKAFFGEGKETNRDESFYGDFVLAYDILLKVDHIYDAIRNYVTQKPYSKDKFKLYFQNPQFMGGWDKDKE
TDYRATILRYGSKYYLAIMDKKYAKCLQKIDKDDVNGNYEKINYKLLPGPNKMLPKVFFSKKWMAYYNPSEDIQKIY
KNGTFKKGDMFNLNDCHKLIDFFKDSISRYPKWSNAYDENFSETEKYKDIAGFYREVEEQGYKVSFESASKKEVDKL
VEEGKLYMFQIYNKDFSDKSHGTPNLHTMYFKLLFDENNHGQIRLSGGAELFMRRASLKKEELVVHPANSPIANKNP
DNPKKITTLSYDVYKDKRESEDQYELHIPIAINKCPKNIFKINTEVRVLLKHDDNPYVIGIDRGERNLLYIVVVDGK
GNIVEQYSLNEIINNFNGIRIKTDYHSLLDKKEKERFEARQNWTSIENIKELKAGYISQVVHKICELVEKYDAVIAL
EDLNSGFKNSRVKVEKQVYQKFEKMLIDKLNYMVDKKSNPCATGGALKGYQITNKFESFKSMSTQNGFIFYIPAWLT
SKIDPSTGFVNLLKTKYTSIADSKKFISSFDRIMYVPEEDLFEFALDYKNFSRTDADYIKKWKLYSYGNRIRIFRNP
KKNNVEDWEEVCLTSAYKELENKYGINYQQGDIRALLCEQSDKAFYSSFMALMSLMLQMRNSITGRTDVDFLISPVK
NSDGIFYDSRNYEAQENAILPKNADANGAYNIARKVLWAIGQFKKAEDEKLDKVKIAISNKEWLEYAQTSVKH
XPXPXPXP
MVSKGEELFTGVVPILVELDGDVNGHKFSVSGEGEGDATYGKLTLKFICTTGKLPVPWPTLVTT
LTYGVQCFSRYPDHMKQHDFFKSAMPEGYVQERTIFFKDDGNYKTRAEVKFEGDTLVNRIELKGIDFKEDGNILGH
KLEYNYNSHNVYIMADKQKNGIKVNFKIRHNIEDGSVQLADHYQQNTPIGDGPVLLPDNHYLSTQSALSKDPNEKR
DHMVLLEFVTAAGITLGMDELYK
SEQ ID NO: 197
MSKLEKFTNCYSLSKTLRFKAIPVGKTQENIDNKRLLVEDEKRAEDYKGVKKLLDRYYLSFINDVLHSIKLKNLNNY
ISLFRKKTRTEKENKELENLEINLRKEIAKAFKGNEGYKSLFKKDIIETILPEFLDDKDEIALVNSENGETTAFTGE
FDNRENMESEEAKSTSIAFRCINENLTRYISNMDIFEKVDAIFDKHEVQEIKEKILNSDYDVEDFFEGEFFNEVLIQ
EGIDVYNAIIGGFVTESGEKIKGLNEYINLYNQKTKQKLPKFKPLYKQVLSDRESLSFYGEGYTSDEEVLEVERNTL
NKNSEIFSSIKKLEKLFKNFDEYSSAGIFVKNGPAISTISKDIFGEWNVIRDKWNAEYDDIHLKKKAVVTEKYEDDR
RKSFKKIGSFSLEQLQEYADADLSVVEKLKEIIIQKVDEIYKVYGSSEKLFDADFVLEKSLKKNDAVVAIMKDLLDS
VKSFENYIKAFFGEGKETNRDESFYGDFVLAYDILLKVDHIYDAIRNYVTQKPYSKDKFKLYFQNPQFMGGWDKDKE
TDYRATILRYGSKYYLAIMDKKYAKCLQKIDKDDVNGNYEKINYKLLPGPNKMLPKVFFSKKWMAYYNPSEDIQKIY
KNGTFKKGDMFNLNDCHKLIDFFKDSISRYPKWSNAYDENFSETEKYKDIAGFYREVEEQGYKVSFESASKKEVDKL
VEEGKLYMFQIYNKDFSDKSHGTPNLHTMYFKLLFDENNHGQIRLSGGAELFMRRASLKKEELVVHPANSPIANKNP
DNPKKITTLSYDVYKDKRESEDQYELHIPIAINKCPKNIFKINTEVRVLLKHDDNPYVIGIDRGERNLLYIVVVDGK
GNIVEQYSLNEIINNFNGIRIKTDYHSLLDKKEKERFEARQNWTSIENIKELKAGYISQVVHKICELVEKYDAVIAL
EDLNSGFKNSRVKVEKQVYQKFEKMLIDKLNYMVDKKSNPCATGGALKGYQITNKFESFKSMSTQNGFIFYIPAWLT
SKIDPSTGFVNLLKTKYTSIADSKKFISSFDRIMYVPEEDLFEFALDYKNFSRTDADYIKKWKLYSYGNRIRIFRNP
KKNNVEDWEEVCLTSAYKELENKYGINYQQGDIRALLCEQSDKAFYSSFMALMSLMLQMRNSITGRTDVDFLISPVK
NSDGIFYDSRNYEAQENAILPKNADANGAYNIARKVLWAIGQFKKAEDEKLDKVKIAISNKEWLEYAQTSVKH
XPXPXPXPXP
MVSKGEELFTGVVPILVELDGDVNGHKFSVSGEGEGDATYGKLTLKFICTTGKLPVPWPTLVTT
LTYGVQCFSRYPDHMKQHDFFKSAMPEGYVQERTIFFKDDGNYKTRAEVKFEGDTLVNRIELKGIDFKEDGNILGH
KLEYNYNSHNVYIMADKQKNGIKVNFKIRHNIEDGSVQLADHYQQNTPIGDGPVLLPDNHYLSTQSALSKDPNEKR
DHMVLLEFVTAAGITLGMDELYK
SEQ ID NO: 198
MSKLEKFTNCYSLSKTLRFKAIPVGKTQENIDNKRLLVEDEKRAEDYKGVKKLLDRYYLSFINDVLHSIKLKNLNNY
ISLFRKKTRTEKENKELENLEINLRKEIAKAFKGNEGYKSLFKKDIIETILPEFLDDKDEIALVNSENGETTAFTGE
FDNRENMESEEAKSTSIAFRCINENLTRYISNMDIFEKVDAIFDKHEVQEIKEKILNSDYDVEDFFEGEFFNEVLIQ
EGIDVYNAIIGGFVTESGEKIKGLNEYINLYNQKTKQKLPKFKPLYKQVLSDRESLSFYGEGYTSDEEVLEVERNTL
NKNSEIFSSIKKLEKLFKNFDEYSSAGIFVKNGPAISTISKDIFGEWNVIRDKWNAEYDDIHLKKKAVVTEKYEDDR
RKSFKKIGSFSLEQLQEYADADLSVVEKLKEIIIQKVDEIYKVYGSSEKLFDADFVLEKSLKKNDAVVAIMKDLLDS
VKSFENYIKAFFGEGKETNRDESFYGDFVLAYDILLKVDHIYDAIRNYVTQKPYSKDKFKLYFQNPQFMGGWDKDKE
TDYRATILRYGSKYYLAIMDKKYAKCLQKIDKDDVNGNYEKINYKLLPGPNKMLPKVFFSKKWMAYYNPSEDIQKIY
KNGTFKKGDMFNLNDCHKLIDFFKDSISRYPKWSNAYDENFSETEKYKDIAGFYREVEEQGYKVSFESASKKEVDKL
VEEGKLYMFQIYNKDFSDKSHGTPNLHTMYFKLLFDENNHGQIRLSGGAELFMRRASLKKEELVVHPANSPIANKNP
DNPKKITTLSYDVYKDKRESEDQYELHIPIAINKCPKNIFKINTEVRVLLKHDDNPYVIGIDRGERNLLYIVVVDGK
GNIVEQYSLNEIINNFNGIRIKTDYHSLLDKKEKERFEARQNWTSIENIKELKAGYISQVVHKICELVEKYDAVIAL
EDLNSGFKNSRVKVEKQVYQKFEKMLIDKLNYMVDKKSNPCATGGALKGYQITNKFESFKSMSTQNGFIFYIPAWLT
SKIDPSTGFVNLLKTKYTSIADSKKFISSFDRIMYVPEEDLFEFALDYKNFSRTDADYIKKWKLYSYGNRIRIFRNP
KKNNVEDWEEVCLTSAYKELENKYGINYQQGDIRALLCEQSDKAFYSSFMALMSLMLQMRNSITGRTDVDFLISPVK
NSDGIFYDSRNYEAQENAILPKNADANGAYNIARKVLWAIGQFKKAEDEKLDKVKIAISNKEWLEYAQTSVKH
XPXPXPXPXPXP
MVSKGEELFTGVVPILVELDGDVNGHKFSVSGEGEGDATYGKLTLKFICTTGKLPVPWPTLVTT
LTYGVQCFSRYPDHMKQHDFFKSAMPEGYVQERTIFFKDDGNYKTRAEVKFEGDTLVNRIELKGIDFKEDGNILGH
KLEYNYNSHNVYIMADKQKNGIKVNFKIRHNIEDGSVQLADHYQQNTPIGDGPVLLPDNHYLSTQSALSKDPNEKR
DHMVLLEFVTAAGITLGMDELYK
SEQ ID NO: 199
MSKLEKFTNCYSLSKTLRFKAIPVGKTQENIDNKRLLVEDEKRAEDYKGVKKLLDRYYLSFINDVLHSIKLKNLNNY
ISLFRKKTRTEKENKELENLEINLRKEIAKAFKGNEGYKSLFKKDIIETILPEFLDDKDEIALVNSENGETTAFTGE
FDNRENMESEEAKSTSIAFRCINENLTRYISNMDIFEKVDAIFDKHEVQEIKEKILNSDYDVEDFFEGEFFNEVLIQ
EGIDVYNAIIGGFVTESGEKIKGLNEYINLYNQKTKQKLPKFKPLYKQVLSDRESLSFYGEGYTSDEEVLEVERNTL
NKNSEIFSSIKKLEKLFKNFDEYSSAGIFVKNGPAISTISKDIFGEWNVIRDKWNAEYDDIHLKKKAVVTEKYEDDR
RKSFKKIGSFSLEQLQEYADADLSVVEKLKEIIIQKVDEIYKVYGSSEKLFDADFVLEKSLKKNDAVVAIMKDLLDS
VKSFENYIKAFFGEGKETNRDESFYGDFVLAYDILLKVDHIYDAIRNYVTQKPYSKDKFKLYFQNPQFMGGWDKDKE
TDYRATILRYGSKYYLAIMDKKYAKCLQKIDKDDVNGNYEKINYKLLPGPNKMLPKVFFSKKWMAYYNPSEDIQKIY
KNGTFKKGDMFNLNDCHKLIDFFKDSISRYPKWSNAYDENFSETEKYKDIAGFYREVEEQGYKVSFESASKKEVDKL
VEEGKLYMFQIYNKDFSDKSHGTPNLHTMYFKLLFDENNHGQIRLSGGAELFMRRASLKKEELVVHPANSPIANKNP
DNPKKITTLSYDVYKDKRESEDQYELHIPIAINKCPKNIFKINTEVRVLLKHDDNPYVIGIDRGERNLLYIVVVDGK
GNIVEQYSLNEIINNFNGIRIKTDYHSLLDKKEKERFEARQNWTSIENIKELKAGYISQVVHKICELVEKYDAVIAL
EDLNSGFKNSRVKVEKQVYQKFEKMLIDKLNYMVDKKSNPCATGGALKGYQITNKFESFKSMSTQNGFIFYIPAWLT
SKIDPSTGFVNLLKTKYTSIADSKKFISSFDRIMYVPEEDLFEFALDYKNFSRTDADYIKKWKLYSYGNRIRIFRNP
KKNNVEDWEEVCLTSAYKELENKYGINYQQGDIRALLCEQSDKAFYSSFMALMSLMLQMRNSITGRTDVDFLISPVK
NSDGIFYDSRNYEAQENAILPKNADANGAYNIARKVLWAIGQFKKAEDEKLDKVKIAISNKEWLEYAQTSVKH
XPXPXPXPXPXPXP
MVSKGEELFTGVVPILVELDGDVNGHKFSVSGEGEGDATYGKLTLKFICTTGKLPVPWPTLVTT
LTYGVQCFSRYPDHMKQHDFFKSAMPEGYVQERTIFFKDDGNYKTRAEVKFEGDTLVNRIELKGIDFKEDGNILGH
KLEYNYNSHNVYIMADKQKNGIKVNFKIRHNIEDGSVQLADHYQQNTPIGDGPVLLPDNHYLSTQSALSKDPNEKR
DHMVLLEFVTAAGITLGMDELYK
SEQ ID NO: 200
MSKLEKFTNCYSLSKTLRFKAIPVGKTQENIDNKRLLVEDEKRAEDYKGVKKLLDRYYLSFINDVLHSIKLKNLNNY
ISLFRKKTRTEKENKELENLEINLRKEIAKAFKGNEGYKSLFKKDIIETILPEFLDDKDEIALVNSENGETTAFTGE
FDNRENMESEEAKSTSIAFRCINENLTRYISNMDIFEKVDAIFDKHEVQEIKEKILNSDYDVEDFFEGEFFNEVLIQ
EGIDVYNAIIGGFVTESGEKIKGLNEYINLYNQKTKQKLPKFKPLYKQVLSDRESLSFYGEGYTSDEEVLEVERNTL
NKNSEIFSSIKKLEKLFKNFDEYSSAGIFVKNGPAISTISKDIFGEWNVIRDKWNAEYDDIHLKKKAVVTEKYEDDR
RKSFKKIGSFSLEQLQEYADADLSVVEKLKEIIIQKVDEIYKVYGSSEKLFDADFVLEKSLKKNDAVVAIMKDLLDS
VKSFENYIKAFFGEGKETNRDESFYGDFVLAYDILLKVDHIYDAIRNYVTQKPYSKDKFKLYFQNPQFMGGWDKDKE
TDYRATILRYGSKYYLAIMDKKYAKCLQKIDKDDVNGNYEKINYKLLPGPNKMLPKVFFSKKWMAYYNPSEDIQKIY
KNGTFKKGDMFNLNDCHKLIDFFKDSISRYPKWSNAYDENFSETEKYKDIAGFYREVEEQGYKVSFESASKKEVDKL
VEEGKLYMFQIYNKDFSDKSHGTPNLHTMYFKLLFDENNHGQIRLSGGAELFMRRASLKKEELVVHPANSPIANKNP
DNPKKITTLSYDVYKDKRESEDQYELHIPIAINKCPKNIFKINTEVRVLLKHDDNPYVIGIDRGERNLLYIVVVDGK
GNIVEQYSLNEIINNFNGIRIKTDYHSLLDKKEKERFEARQNWTSIENIKELKAGYISQVVHKICELVEKYDAVIAL
EDLNSGFKNSRVKVEKQVYQKFEKMLIDKLNYMVDKKSNPCATGGALKGYQITNKFESFKSMSTQNGFIFYIPAWLT
SKIDPSTGFVNLLKTKYTSIADSKKFISSFDRIMYVPEEDLFEFALDYKNFSRTDADYIKKWKLYSYGNRIRIFRNP
KKNNVEDWEEVCLTSAYKELENKYGINYQQGDIRALLCEQSDKAFYSSFMALMSLMLQMRNSITGRTDVDFLISPVK
NSDGIFYDSRNYEAQENAILPKNADANGAYNIARKVLWAIGQFKKAEDEKLDKVKIAISNKEWLEYAQTSVKH
XPXPXPXPXPXPXPXP
MVSKGEELFTGVVPILVELDGDVNGHKFSVSGEGEGDATYGKLTLKFICTTGKLPVPWPTLVTT
LTYGVQCFSRYPDHMKQHDFFKSAMPEGYVQERTIFFKDDGNYKTRAEVKFEGDTLVNRIELKGIDFKEDGNILGH
KLEYNYNSHNVYIMADKQKNGIKVNFKIRHNIEDGSVQLADHYQQNTPIGDGPVLLPDNHYLSTQSALSKDPNEKR
DHMVLLEFVTAAGITLGMDELYK
SEQ ID NO: 201
MSKLEKFTNCYSLSKTLRFKAIPVGKTQENIDNKRLLVEDEKRAEDYKGVKKLLDRYYLSFINDVLHSIKLKNLNNY
ISLFRKKTRTEKENKELENLEINLRKEIAKAFKGNEGYKSLFKKDIIETILPEFLDDKDEIALVNSENGETTAFTGE
FDNRENMESEEAKSTSIAFRCINENLTRYISNMDIFEKVDAIFDKHEVQEIKEKILNSDYDVEDFFEGEFFNEVLIQ
EGIDVYNAIIGGFVTESGEKIKGLNEYINLYNQKTKQKLPKFKPLYKQVLSDRESLSFYGEGYTSDEEVLEVERNTL
NKNSEIFSSIKKLEKLFKNFDEYSSAGIFVKNGPAISTISKDIFGEWNVIRDKWNAEYDDIHLKKKAVVTEKYEDDR
RKSFKKIGSFSLEQLQEYADADLSVVEKLKEIIIQKVDEIYKVYGSSEKLFDADFVLEKSLKKNDAVVAIMKDLLDS
VKSFENYIKAFFGEGKETNRDESFYGDFVLAYDILLKVDHIYDAIRNYVTQKPYSKDKFKLYFQNPQFMGGWDKDKE
TDYRATILRYGSKYYLAIMDKKYAKCLQKIDKDDVNGNYEKINYKLLPGPNKMLPKVFFSKKWMAYYNPSEDIQKIY
KNGTFKKGDMFNLNDCHKLIDFFKDSISRYPKWSNAYDENFSETEKYKDIAGFYREVEEQGYKVSFESASKKEVDKL
VEEGKLYMFQIYNKDFSDKSHGTPNLHTMYFKLLFDENNHGQIRLSGGAELFMRRASLKKEELVVHPANSPIANKNP
DNPKKITTLSYDVYKDKRESEDQYELHIPIAINKCPKNIFKINTEVRVLLKHDDNPYVIGIDRGERNLLYIVVVDGK
GNIVEQYSLNEIINNFNGIRIKTDYHSLLDKKEKERFEARQNWTSIENIKELKAGYISQVVHKICELVEKYDAVIAL
EDLNSGFKNSRVKVEKQVYQKFEKMLIDKLNYMVDKKSNPCATGGALKGYQITNKFESFKSMSTQNGFIFYIPAWLT
SKIDPSTGFVNLLKTKYTSIADSKKFISSFDRIMYVPEEDLFEFALDYKNFSRTDADYIKKWKLYSYGNRIRIFRNP
KKNNVEDWEEVCLTSAYKELENKYGINYQQGDIRALLCEQSDKAFYSSFMALMSLMLQMRNSITGRTDVDFLISPVK
NSDGIFYDSRNYEAQENAILPKNADANGAYNIARKVLWAIGQFKKAEDEKLDKVKIAISNKEWLEYAQTSVKH
XPXPXPXPXPXPXPXPXP
MVSKGEELFTGVVPILVELDGDVNGHKFSVSGEGEGDATYGKLTLKFICTTGKLPVPWPTLVTT
LTYGVQCFSRYPDHMKQHDFFKSAMPEGYVQERTIFFKDDGNYKTRAEVKFEGDTLVNRIELKGIDFKEDGNILGH
KLEYNYNSHNVYIMADKQKNGIKVNFKIRHNIEDGSVQLADHYQQNTPIGDGPVLLPDNHYLSTQSALSKDPNEKR
DHMVLLEFVTAAGITLGMDELYK
SEQ ID NO: 202
MSKLEKFTNCYSLSKTLRFKAIPVGKTQENIDNKRLLVEDEKRAEDYKGVKKLLDRYYLSFINDVLHSIKLKNLNNY
ISLFRKKTRTEKENKELENLEINLRKEIAKAFKGNEGYKSLFKKDIIETILPEFLDDKDEIALVNSENGETTAFTGE
FDNRENMESEEAKSTSIAFRCINENLTRYISNMDIFEKVDAIFDKHEVQEIKEKILNSDYDVEDFFEGEFFNEVLIQ
EGIDVYNAIIGGFVTESGEKIKGLNEYINLYNQKTKQKLPKFKPLYKQVLSDRESLSFYGEGYTSDEEVLEVERNTL
NKNSEIFSSIKKLEKLFKNFDEYSSAGIFVKNGPAISTISKDIFGEWNVIRDKWNAEYDDIHLKKKAVVTEKYEDDR
RKSFKKIGSFSLEQLQEYADADLSVVEKLKEIIIQKVDEIYKVYGSSEKLFDADFVLEKSLKKNDAVVAIMKDLLDS
VKSFENYIKAFFGEGKETNRDESFYGDFVLAYDILLKVDHIYDAIRNYVTQKPYSKDKFKLYFQNPQFMGGWDKDKE
TDYRATILRYGSKYYLAIMDKKYAKCLQKIDKDDVNGNYEKINYKLLPGPNKMLPKVFFSKKWMAYYNPSEDIQKIY
KNGTFKKGDMFNLNDCHKLIDFFKDSISRYPKWSNAYDENFSETEKYKDIAGFYREVEEQGYKVSFESASKKEVDKL
VEEGKLYMFQIYNKDFSDKSHGTPNLHTMYFKLLFDENNHGQIRLSGGAELFMRRASLKKEELVVHPANSPIANKNP
DNPKKITTLSYDVYKDKRESEDQYELHIPIAINKCPKNIFKINTEVRVLLKHDDNPYVIGIDRGERNLLYIVVVDGK
GNIVEQYSLNEIINNFNGIRIKTDYHSLLDKKEKERFEARQNWTSIENIKELKAGYISQVVHKICELVEKYDAVIAL
EDLNSGFKNSRVKVEKQVYQKFEKMLIDKLNYMVDKKSNPCATGGALKGYQITNKFESFKSMSTQNGFIFYIPAWLT
SKIDPSTGFVNLLKTKYTSIADSKKFISSFDRIMYVPEEDLFEFALDYKNFSRTDADYIKKWKLYSYGNRIRIFRNP
KKNNVEDWEEVCLTSAYKELENKYGINYQQGDIRALLCEQSDKAFYSSFMALMSLMLQMRNSITGRTDVDFLISPVK
NSDGIFYDSRNYEAQENAILPKNADANGAYNIARKVLWAIGQFKKAEDEKLDKVKIAISNKEWLEYAQTSVKH
XPXPXPXPXPXPXPXPXPXP
MVSKGEELFTGVVPILVELDGDVNGHKFSVSGEGEGDATYGKLTLKFICTTGKLPVPWPTLVTT
LTYGVQCFSRYPDHMKQHDFFKSAMPEGYVQERTIFFKDDGNYKTRAEVKFEGDTLVNRIELKGIDFKEDGNILGH
KLEYNYNSHNVYIMADKQKNGIKVNFKIRHNIEDGSVQLADHYQQNTPIGDGPVLLPDNHYLSTQSALSKDPNEKR
DHMVLLEFVTAAGITLGMDELYK
SEQ ID NO: 203
MSKLEKFTNCYSLSKTLRFKAIPVGKTQENIDNKRLLVEDEKRAEDYKGVKKLLDRYYLSFINDVLHSIKLKNLNNY
ISLFRKKTRTEKENKELENLEINLRKEIAKAFKGNEGYKSLFKKDIIETILPEFLDDKDEIALVNSENGETTAFTGE
FDNRENMESEEAKSTSIAFRCINENLTRYISNMDIFEKVDAIFDKHEVQEIKEKILNSDYDVEDFFEGEFFNEVLIQ
EGIDVYNAIIGGFVTESGEKIKGLNEYINLYNQKTKQKLPKFKPLYKQVLSDRESLSFYGEGYTSDEEVLEVERNTL
NKNSEIFSSIKKLEKLFKNFDEYSSAGIFVKNGPAISTISKDIFGEWNVIRDKWNAEYDDIHLKKKAVVTEKYEDDR
RKSFKKIGSFSLEQLQEYADADLSVVEKLKEIIIQKVDEIYKVYGSSEKLFDADFVLEKSLKKNDAVVAIMKDLLDS
VKSFENYIKAFFGEGKETNRDESFYGDFVLAYDILLKVDHIYDAIRNYVTQKPYSKDKFKLYFQNPQFMGGWDKDKE
TDYRATILRYGSKYYLAIMDKKYAKCLQKIDKDDVNGNYEKINYKLLPGPNKMLPKVFFSKKWMAYYNPSEDIQKIY
KNGTFKKGDMFNLNDCHKLIDFFKDSISRYPKWSNAYDENFSETEKYKDIAGFYREVEEQGYKVSFESASKKEVDKL
VEEGKLYMFQIYNKDFSDKSHGTPNLHTMYFKLLFDENNHGQIRLSGGAELFMRRASLKKEELVVHPANSPIANKNP
DNPKKITTLSYDVYKDKRESEDQYELHIPIAINKCPKNIFKINTEVRVLLKHDDNPYVIGIDRGERNLLYIVVVDGK
GNIVEQYSLNEIINNFNGIRIKTDYHSLLDKKEKERFEARQNWTSIENIKELKAGYISQVVHKICELVEKYDAVIAL
EDLNSGFKNSRVKVEKQVYQKFEKMLIDKLNYMVDKKSNPCATGGALKGYQITNKFESFKSMSTQNGFIFYIPAWLT
SKIDPSTGFVNLLKTKYTSIADSKKFISSFDRIMYVPEEDLFEFALDYKNFSRTDADYIKKWKLYSYGNRIRIFRNP
KKNNVEDWEEVCLTSAYKELENKYGINYQQGDIRALLCEQSDKAFYSSFMALMSLMLQMRNSITGRTDVDFLISPVK
NSDGIFYDSRNYEAQENAILPKNADANGAYNIARKVLWAIGQFKKAEDEKLDKVKIAISNKEWLEYAQTSVKH
XPXPXPXPXPXPXPXPXPXPXP
MVSKGEELFTGVVPILVELDGDVNGHKFSVSGEGEGDATYGKLTLKFICTTGKLPVPWPTLVTT
LTYGVQCFSRYPDHMKQHDFFKSAMPEGYVQERTIFFKDDGNYKTRAEVKFEGDTLVNRIELKGIDFKEDGNILGH
KLEYNYNSHNVYIMADKQKNGIKVNFKIRHNIEDGSVQLADHYQQNTPIGDGPVLLPDNHYLSTQSALSKDPNEKR
DHMVLLEFVTAAGITLGMDELYK
SEQ ID NO: 204
MSKLEKFTNCYSLSKTLRFKAIPVGKTQENIDNKRLLVEDEKRAEDYKGVKKLLDRYYLSFINDVLHSIKLKNLNNY
ISLFRKKTRTEKENKELENLEINLRKEIAKAFKGNEGYKSLFKKDIIETILPEFLDDKDEIALVNSENGETTAFTGE
FDNRENMESEEAKSTSIAFRCINENLTRYISNMDIFEKVDAIFDKHEVQEIKEKILNSDYDVEDFFEGEFFNEVLIQ
EGIDVYNAIIGGFVTESGEKIKGLNEYINLYNQKTKQKLPKFKPLYKQVLSDRESLSFYGEGYTSDEEVLEVERNTL
NKNSEIFSSIKKLEKLFKNFDEYSSAGIFVKNGPAISTISKDIFGEWNVIRDKWNAEYDDIHLKKKAVVTEKYEDDR
RKSFKKIGSFSLEQLQEYADADLSVVEKLKEIIIQKVDEIYKVYGSSEKLFDADFVLEKSLKKNDAVVAIMKDLLDS
VKSFENYIKAFFGEGKETNRDESFYGDFVLAYDILLKVDHIYDAIRNYVTQKPYSKDKFKLYFQNPQFMGGWDKDKE
TDYRATILRYGSKYYLAIMDKKYAKCLQKIDKDDVNGNYEKINYKLLPGPNKMLPKVFFSKKWMAYYNPSEDIQKIY
KNGTFKKGDMFNLNDCHKLIDFFKDSISRYPKWSNAYDENFSETEKYKDIAGFYREVEEQGYKVSFESASKKEVDKL
VEEGKLYMFQIYNKDFSDKSHGTPNLHTMYFKLLFDENNHGQIRLSGGAELFMRRASLKKEELVVHPANSPIANKNP
DNPKKITTLSYDVYKDKRESEDQYELHIPIAINKCPKNIFKINTEVRVLLKHDDNPYVIGIDRGERNLLYIVVVDGK
GNIVEQYSLNEIINNFNGIRIKTDYHSLLDKKEKERFEARQNWTSIENIKELKAGYISQVVHKICELVEKYDAVIAL
EDLNSGFKNSRVKVEKQVYQKFEKMLIDKLNYMVDKKSNPCATGGALKGYQITNKFESFKSMSTQNGFIFYIPAWLT
SKIDPSTGFVNLLKTKYTSIADSKKFISSFDRIMYVPEEDLFEFALDYKNFSRTDADYIKKWKLYSYGNRIRIFRNP
KKNNVEDWEEVCLTSAYKELENKYGINYQQGDIRALLCEQSDKAFYSSFMALMSLMLQMRNSITGRTDVDFLISPVK
NSDGIFYDSRNYEAQENAILPKNADANGAYNIARKVLWAIGQFKKAEDEKLDKVKIAISNKEWLEYAQTSVKH
XPXPXPXPXPXPXPXPXPXPXPXP
MVSKGEELFTGVVPILVELDGDVNGHKFSVSGEGEGDATYGKLTLKFICTTGKLPVPWPTLVTT
LTYGVQCFSRYPDHMKQHDFFKSAMPEGYVQERTIFFKDDGNYKTRAEVKFEGDTLVNRIELKGIDFKEDGNILGH
KLEYNYNSHNVYIMADKQKNGIKVNFKIRHNIEDGSVQLADHYQQNTPIGDGPVLLPDNHYLSTQSALSKDPNEKR
DHMVLLEFVTAAGITLGMDELYK
SEQ ID NO: 205
MSKLEKFTNCYSLSKTLRFKAIPVGKTQENIDNKRLLVEDEKRAEDYKGVKKLLDRYYLSFINDVLHSIKLKNLNNY
ISLFRKKTRTEKENKELENLEINLRKEIAKAFKGNEGYKSLFKKDIIETILPEFLDDKDEIALVNSENGETTAFTGE
FDNRENMESEEAKSTSIAFRCINENLTRYISNMDIFEKVDAIFDKHEVQEIKEKILNSDYDVEDFFEGEFFNEVLIQ
EGIDVYNAIIGGFVTESGEKIKGLNEYINLYNQKTKQKLPKFKPLYKQVLSDRESLSFYGEGYTSDEEVLEVERNTL
NKNSEIFSSIKKLEKLFKNFDEYSSAGIFVKNGPAISTISKDIFGEWNVIRDKWNAEYDDIHLKKKAVVTEKYEDDR
RKSFKKIGSFSLEQLQEYADADLSVVEKLKEIIIQKVDEIYKVYGSSEKLFDADFVLEKSLKKNDAVVAIMKDLLDS
VKSFENYIKAFFGEGKETNRDESFYGDFVLAYDILLKVDHIYDAIRNYVTQKPYSKDKFKLYFQNPQFMGGWDKDKE
TDYRATILRYGSKYYLAIMDKKYAKCLQKIDKDDVNGNYEKINYKLLPGPNKMLPKVFFSKKWMAYYNPSEDIQKIY
KNGTFKKGDMFNLNDCHKLIDFFKDSISRYPKWSNAYDENFSETEKYKDIAGFYREVEEQGYKVSFESASKKEVDKL
VEEGKLYMFQIYNKDFSDKSHGTPNLHTMYFKLLFDENNHGQIRLSGGAELFMRRASLKKEELVVHPANSPIANKNP
DNPKKITTLSYDVYKDKRESEDQYELHIPIAINKCPKNIFKINTEVRVLLKHDDNPYVIGIDRGERNLLYIVVVDGK
GNIVEQYSLNEIINNFNGIRIKTDYHSLLDKKEKERFEARQNWTSIENIKELKAGYISQVVHKICELVEKYDAVIAL
EDLNSGFKNSRVKVEKQVYQKFEKMLIDKLNYMVDKKSNPCATGGALKGYQITNKFESFKSMSTQNGFIFYIPAWLT
SKIDPSTGFVNLLKTKYTSIADSKKFISSFDRIMYVPEEDLFEFALDYKNFSRTDADYIKKWKLYSYGNRIRIFRNP
KKNNVEDWEEVCLTSAYKELENKYGINYQQGDIRALLCEQSDKAFYSSFMALMSLMLQMRNSITGRTDVDFLISPVK
NSDGIFYDSRNYEAQENAILPKNADANGAYNIARKVLWAIGQFKKAEDEKLDKVKIAISNKEWLEYAQTSVKH
XPXPXPXPXPXPXPXPXPXPXPXPXP
MVSKGEELFTGVVPILVELDGDVNGHKFSVSGEGEGDATYGKLTLKFICTTGKLPVPWPTLVTT
LTYGVQCFSRYPDHMKQHDFFKSAMPEGYVQERTIFFKDDGNYKTRAEVKFEGDTLVNRIELKGIDFKEDGNILGH
KLEYNYNSHNVYIMADKQKNGIKVNFKIRHNIEDGSVQLADHYQQNTPIGDGPVLLPDNHYLSTQSALSKDPNEKR
DHMVLLEFVTAAGITLGMDELYK
SEQ ID NO: 206
MSKLEKFTNCYSLSKTLRFKAIPVGKTQENIDNKRLLVEDEKRAEDYKGVKKLLDRYYLSFINDVLHSIKLKNLNNY
ISLFRKKTRTEKENKELENLEINLRKEIAKAFKGNEGYKSLFKKDIIETILPEFLDDKDEIALVNSENGETTAFTGE
FDNRENMESEEAKSTSIAFRCINENLTRYISNMDIFEKVDAIFDKHEVQEIKEKILNSDYDVEDFFEGEFFNEVLIQ
EGIDVYNAIIGGFVTESGEKIKGLNEYINLYNQKTKQKLPKFKPLYKQVLSDRESLSFYGEGYTSDEEVLEVERNTL
NKNSEIFSSIKKLEKLFKNFDEYSSAGIFVKNGPAISTISKDIFGEWNVIRDKWNAEYDDIHLKKKAVVTEKYEDDR
RKSFKKIGSFSLEQLQEYADADLSVVEKLKEIIIQKVDEIYKVYGSSEKLFDADFVLEKSLKKNDAVVAIMKDLLDS
VKSFENYIKAFFGEGKETNRDESFYGDFVLAYDILLKVDHIYDAIRNYVTQKPYSKDKFKLYFQNPQFMGGWDKDKE
TDYRATILRYGSKYYLAIMDKKYAKCLQKIDKDDVNGNYEKINYKLLPGPNKMLPKVFFSKKWMAYYNPSEDIQKIY
KNGTFKKGDMFNLNDCHKLIDFFKDSISRYPKWSNAYDENFSETEKYKDIAGFYREVEEQGYKVSFESASKKEVDKL
VEEGKLYMFQIYNKDFSDKSHGTPNLHTMYFKLLFDENNHGQIRLSGGAELFMRRASLKKEELVVHPANSPIANKNP
DNPKKITTLSYDVYKDKRESEDQYELHIPIAINKCPKNIFKINTEVRVLLKHDDNPYVIGIDRGERNLLYIVVVDGK
GNIVEQYSLNEIINNFNGIRIKTDYHSLLDKKEKERFEARQNWTSIENIKELKAGYISQVVHKICELVEKYDAVIAL
EDLNSGFKNSRVKVEKQVYQKFEKMLIDKLNYMVDKKSNPCATGGALKGYQITNKFESFKSMSTQNGFIFYIPAWLT
SKIDPSTGFVNLLKTKYTSIADSKKFISSFDRIMYVPEEDLFEFALDYKNFSRTDADYIKKWKLYSYGNRIRIFRNP
KKNNVEDWEEVCLTSAYKELENKYGINYQQGDIRALLCEQSDKAFYSSFMALMSLMLQMRNSITGRTDVDFLISPVK
NSDGIFYDSRNYEAQENAILPKNADANGAYNIARKVLWAIGQFKKAEDEKLDKVKIAISNKEWLEYAQTSVKH
XPXPXPXPXPXPXPXPXPXPXPXPXPXP
MVSKGEELFTGVVPILVELDGDVNGHKFSVSGEGEGDATYGKLTLKFICTTGKLPVPWPTLVTT
LTYGVQCFSRYPDHMKQHDFFKSAMPEGYVQERTIFFKDDGNYKTRAEVKFEGDTLVNRIELKGIDFKEDGNILGH
KLEYNYNSHNVYIMADKQKNGIKVNFKIRHNIEDGSVQLADHYQQNTPIGDGPVLLPDNHYLSTQSALSKDPNEKR
DHMVLLEFVTAAGITLGMDELYK
SEQ ID NO: 207
MSKLEKFTNCYSLSKTLRFKAIPVGKTQENIDNKRLLVEDEKRAEDYKGVKKLLDRYYLSFINDVLHSIKLKNLNNY
ISLFRKKTRTEKENKELENLEINLRKEIAKAFKGNEGYKSLFKKDIIETILPEFLDDKDEIALVNSENGETTAFTGE
FDNRENMESEEAKSTSIAFRCINENLTRYISNMDIFEKVDAIFDKHEVQEIKEKILNSDYDVEDFFEGEFFNEVLIQ
EGIDVYNAIIGGFVTESGEKIKGLNEYINLYNQKTKQKLPKFKPLYKQVLSDRESLSFYGEGYTSDEEVLEVERNTL
NKNSEIFSSIKKLEKLFKNFDEYSSAGIFVKNGPAISTISKDIFGEWNVIRDKWNAEYDDIHLKKKAVVTEKYEDDR
RKSFKKIGSFSLEQLQEYADADLSVVEKLKEIIIQKVDEIYKVYGSSEKLFDADFVLEKSLKKNDAVVAIMKDLLDS
VKSFENYIKAFFGEGKETNRDESFYGDFVLAYDILLKVDHIYDAIRNYVTQKPYSKDKFKLYFQNPQFMGGWDKDKE
TDYRATILRYGSKYYLAIMDKKYAKCLQKIDKDDVNGNYEKINYKLLPGPNKMLPKVFFSKKWMAYYNPSEDIQKIY
KNGTFKKGDMFNLNDCHKLIDFFKDSISRYPKWSNAYDENFSETEKYKDIAGFYREVEEQGYKVSFESASKKEVDKL
VEEGKLYMFQIYNKDFSDKSHGTPNLHTMYFKLLFDENNHGQIRLSGGAELFMRRASLKKEELVVHPANSPIANKNP
DNPKKITTLSYDVYKDKRESEDQYELHIPIAINKCPKNIFKINTEVRVLLKHDDNPYVIGIDRGERNLLYIVVVDGK
GNIVEQYSLNEIINNFNGIRIKTDYHSLLDKKEKERFEARQNWTSIENIKELKAGYISQVVHKICELVEKYDAVIAL
EDLNSGFKNSRVKVEKQVYQKFEKMLIDKLNYMVDKKSNPCATGGALKGYQITNKFESFKSMSTQNGFIFYIPAWLT
SKIDPSTGFVNLLKTKYTSIADSKKFISSFDRIMYVPEEDLFEFALDYKNFSRTDADYIKKWKLYSYGNRIRIFRNP
KKNNVEDWEEVCLTSAYKELENKYGINYQQGDIRALLCEQSDKAFYSSFMALMSLMLQMRNSITGRTDVDFLISPVK
NSDGIFYDSRNYEAQENAILPKNADANGAYNIARKVLWAIGQFKKAEDEKLDKVKIAISNKEWLEYAQTSVKH
GGGGSEAAAKGGGGS
MVSKGEELFTGVVPILVELDGDVNGHKFSVSGEGEGDATYGKLTLKFICTTGKLPVPWPTLVTT
LTYGVQCFSRYPDHMKQHDFFKSAMPEGYVQERTIFFKDDGNYKTRAEVKFEGDTLVNRIELKGIDFKEDGNILGH
KLEYNYNSHNVYIMADKQKNGIKVNFKIRHNIEDGSVQLADHYQQNTPIGDGPVLLPDNHYLSTQSALSKDPNEKR
DHMVLLEFVTAAGITLGMDELYK

[0100] Table V.6 provides chimera fusion proteins between LbCas12a amino acid sequences, linker amino acid sequences (underlined), and mCherry amino acid sequences (bolded, italicized).

TABLE V.6
LbCas12a-Linker-mCherry Chimeras

SEQ ID NO: 208
MSKLEKFTNCYSLSKTLRFKAIPVGKTQENIDNKRLLVEDEKRAEDYKGVKKLLDRYYLSFINDVLHSIKLKNLNNY
ISLFRKKTRTEKENKELENLEINLRKEIAKAFKGNEGYKSLFKKDIIETILPEFLDDKDEIALVNSENGETTAFTGE
FDNRENMESEEAKSTSIAFRCINENLTRYISNMDIFEKVDAIFDKHEVQEIKEKILNSDYDVEDFFEGEFFNEVLIQ
EGIDVYNAIIGGFVTESGEKIKGLNEYINLYNQKTKQKLPKFKPLYKQVLSDRESLSFYGEGYTSDEEVLEVERNTL
NKNSEIFSSIKKLEKLFKNFDEYSSAGIFVKNGPAISTISKDIFGEWNVIRDKWNAEYDDIHLKKKAVVTEKYEDDR
RKSFKKIGSFSLEQLQEYADADLSVVEKLKEIIIQKVDEIYKVYGSSEKLFDADFVLEKSLKKNDAVVAIMKDLLDS
VKSFENYIKAFFGEGKETNRDESFYGDFVLAYDILLKVDHIYDAIRNYVTQKPYSKDKFKLYFQNPQFMGGWDKDKE
TDYRATILRYGSKYYLAIMDKKYAKCLQKIDKDDVNGNYEKINYKLLPGPNKMLPKVFFSKKWMAYYNPSEDIQKIY
KNGTFKKGDMFNLNDCHKLIDFFKDSISRYPKWSNAYDENFSETEKYKDIAGFYREVEEQGYKVSFESASKKEVDKL
VEEGKLYMFQIYNKDFSDKSHGTPNLHTMYFKLLFDENNHGQIRLSGGAELFMRRASLKKEELVVHPANSPIANKNP
DNPKKITTLSYDVYKDKRESEDQYELHIPIAINKCPKNIFKINTEVRVLLKHDDNPYVIGIDRGERNLLYIVVVDGK
GNIVEQYSLNEIINNFNGIRIKTDYHSLLDKKEKERFEARQNWTSIENIKELKAGYISQVVHKICELVEKYDAVIAL
EDLNSGFKNSRVKVEKQVYQKFEKMLIDKLNYMVDKKSNPCATGGALKGYQITNKFESFKSMSTQNGFIFYIPAWLT
SKIDPSTGFVNLLKTKYTSIADSKKFISSFDRIMYVPEEDLFEFALDYKNFSRTDADYIKKWKLYSYGNRIRIFRNP
KKNNVEDWEEVCLTSAYKELENKYGINYQQGDIRALLCEQSDKAFYSSFMALMSLMLQMRNSITGRTDVDFLISPVK
NSDGIFYDSRNYEAQENAILPKNADANGAYNIARKVLWAIGQFKKAEDEKLDKVKIAISNKEWLEYAQTSVKH
GSAGSAAGSGEFMVSKGEEDNMAIIKEFMRFKVHMEGSVNGHEFEIEGEGEGRPYEGTQTAKLKVTKGGPLPFAWD
ILSPQFMYGSKAYVKHPADIPDYLKLSFPEGFKWERVMNFEDGGVVTVTQDSSLQDGEFIYKVKLRGTNFPSDGPV
MQKKTMGWEASSERMYPEDGALKGEIKQRLKLKDGGHYDAEVKTTYKAKKPVQLPGAYNVNIKLDITSHNEDYTIV
EQYERAEGRHSTGGMDELYK
SEQ ID NO: 209
MSKLEKFTNCYSLSKTLRFKAIPVGKTQENIDNKRLLVEDEKRAEDYKGVKKLLDRYYLSFINDVLHSIKLKNLNNY
ISLFRKKTRTEKENKELENLEINLRKEIAKAFKGNEGYKSLFKKDIIETILPEFLDDKDEIALVNSENGETTAFTGE
FDNRENMESEEAKSTSIAFRCINENLTRYISNMDIFEKVDAIFDKHEVQEIKEKILNSDYDVEDFFEGEFFNEVLIQ
EGIDVYNAIIGGFVTESGEKIKGLNEYINLYNQKTKQKLPKFKPLYKQVLSDRESLSFYGEGYTSDEEVLEVERNTL
NKNSEIFSSIKKLEKLFKNFDEYSSAGIFVKNGPAISTISKDIFGEWNVIRDKWNAEYDDIHLKKKAVVTEKYEDDR
RKSFKKIGSFSLEQLQEYADADLSVVEKLKEIIIQKVDEIYKVYGSSEKLFDADFVLEKSLKKNDAVVAIMKDLLDS
VKSFENYIKAFFGEGKETNRDESFYGDFVLAYDILLKVDHIYDAIRNYVTQKPYSKDKFKLYFQNPQFMGGWDKDKE
TDYRATILRYGSKYYLAIMDKKYAKCLQKIDKDDVNGNYEKINYKLLPGPNKMLPKVFFSKKWMAYYNPSEDIQKIY
KNGTFKKGDMFNLNDCHKLIDFFKDSISRYPKWSNAYDENFSETEKYKDIAGFYREVEEQGYKVSFESASKKEVDKL
VEEGKLYMFQIYNKDFSDKSHGTPNLHTMYFKLLFDENNHGQIRLSGGAELFMRRASLKKEELVVHPANSPIANKNP
DNPKKITTLSYDVYKDKRESEDQYELHIPIAINKCPKNIFKINTEVRVLLKHDDNPYVIGIDRGERNLLYIVVVDGK
GNIVEQYSLNEIINNFNGIRIKTDYHSLLDKKEKERFEARQNWTSIENIKELKAGYISQVVHKICELVEKYDAVIAL
EDLNSGFKNSRVKVEKQVYQKFEKMLIDKLNYMVDKKSNPCATGGALKGYQITNKFESFKSMSTQNGFIFYIPAWLT
SKIDPSTGFVNLLKTKYTSIADSKKFISSFDRIMYVPEEDLFEFALDYKNFSRTDADYIKKWKLYSYGNRIRIFRNP
KKNNVEDWEEVCLTSAYKELENKYGINYQQGDIRALLCEQSDKAFYSSFMALMSLMLQMRNSITGRTDVDFLISPVK
NSDGIFYDSRNYEAQENAILPKNADANGAYNIARKVLWAIGQFKKAEDEKLDKVKIAISNKEWLEYAQTSVKH
GGGGSGGGGSGGGGSGGGGSMVSKGEEDNMAIIKEFMRFKVHMEGSVNGHEFEIEGEGEGRPYEGTQTAKLKVTKG
GPLPFAWDILSPQFMYGSKAYVKHPADIPDYLKLSFPEGFKWERVMNFEDGGVVTVTQDSSLQDGEFIYKVKLRGT
NFPSDGPVMQKKTMGWEASSERMYPEDGALKGEIKQRLKLKDGGHYDAEVKTTYKAKKPVQLPGAYNVNIKLDITS
HNEDYTIVEQYERAEGRHSTGGMDELYK
SEQ ID NO: 210
MSKLEKFTNCYSLSKTLRFKAIPVGKTQENIDNKRLLVEDEKRAEDYKGVKKLLDRYYLSFINDVLHSIKLKNLNNY
ISLFRKKTRTEKENKELENLEINLRKEIAKAFKGNEGYKSLFKKDIIETILPEFLDDKDEIALVNSENGETTAFTGE
FDNRENMESEEAKSTSIAFRCINENLTRYISNMDIFEKVDAIFDKHEVQEIKEKILNSDYDVEDFFEGEFFNEVLIQ
EGIDVYNAIIGGFVTESGEKIKGLNEYINLYNQKTKQKLPKFKPLYKQVLSDRESLSFYGEGYTSDEEVLEVERNTL
NKNSEIFSSIKKLEKLFKNFDEYSSAGIFVKNGPAISTISKDIFGEWNVIRDKWNAEYDDIHLKKKAVVTEKYEDDR
RKSFKKIGSFSLEQLQEYADADLSVVEKLKEIIIQKVDEIYKVYGSSEKLFDADFVLEKSLKKNDAVVAIMKDLLDS
VKSFENYIKAFFGEGKETNRDESFYGDFVLAYDILLKVDHIYDAIRNYVTQKPYSKDKFKLYFQNPQFMGGWDKDKE
TDYRATILRYGSKYYLAIMDKKYAKCLQKIDKDDVNGNYEKINYKLLPGPNKMLPKVFFSKKWMAYYNPSEDIQKIY
KNGTFKKGDMFNLNDCHKLIDFFKDSISRYPKWSNAYDENFSETEKYKDIAGFYREVEEQGYKVSFESASKKEVDKL
VEEGKLYMFQIYNKDFSDKSHGTPNLHTMYFKLLFDENNHGQIRLSGGAELFMRRASLKKEELVVHPANSPIANKNP
DNPKKITTLSYDVYKDKRESEDQYELHIPIAINKCPKNIFKINTEVRVLLKHDDNPYVIGIDRGERNLLYIVVVDGK
GNIVEQYSLNEIINNFNGIRIKTDYHSLLDKKEKERFEARQNWTSIENIKELKAGYISQVVHKICELVEKYDAVIAL
EDLNSGFKNSRVKVEKQVYQKFEKMLIDKLNYMVDKKSNPCATGGALKGYQITNKFESFKSMSTQNGFIFYIPAWLT
SKIDPSTGFVNLLKTKYTSIADSKKFISSFDRIMYVPEEDLFEFALDYKNFSRTDADYIKKWKLYSYGNRIRIFRNP
KKNNVEDWEEVCLTSAYKELENKYGINYQQGDIRALLCEQSDKAFYSSFMALMSLMLQMRNSITGRTDVDFLISPVK
NSDGIFYDSRNYEAQENAILPKNADANGAYNIARKVLWAIGQFKKAEDEKLDKVKIAISNKEWLEYAQTSVKH
AEAAAKEAAAKEAAAKEAAAKAMVSKGEEDNMAIIKEFMRFKVHMEGSVNGHEFEIEGEGEGRPYEGTQTAKLKVT
KGGPLPFAWDILSPQFMYGSKAYVKHPADIPDYLKLSFPEGFKWERVMNFEDGGVVTVTQDSSLQDGEFIYKVKLR
GTNFPSDGPVMQKKTMGWEASSERMYPEDGALKGEIKQRLKLKDGGHYDAEVKTTYKAKKPVQLPGAYNVNIKLDI
TSHNEDYTIVEQYERAEGRHSTGGMDELYK
SEQ ID NO: 211
MSKLEKFTNCYSLSKTLRFKAIPVGKTQENIDNKRLLVEDEKRAEDYKGVKKLLDRYYLSFINDVLHSIKLKNLNNY
ISLFRKKTRTEKENKELENLEINLRKEIAKAFKGNEGYKSLFKKDIIETILPEFLDDKDEIALVNSENGETTAFTGE
FDNRENMESEEAKSTSIAFRCINENLTRYISNMDIFEKVDAIFDKHEVQEIKEKILNSDYDVEDFFEGEFFNEVLIQ
EGIDVYNAIIGGFVTESGEKIKGLNEYINLYNQKTKQKLPKFKPLYKQVLSDRESLSFYGEGYTSDEEVLEVERNTL
NKNSEIFSSIKKLEKLFKNFDEYSSAGIFVKNGPAISTISKDIFGEWNVIRDKWNAEYDDIHLKKKAVVTEKYEDDR
RKSFKKIGSFSLEQLQEYADADLSVVEKLKEIIIQKVDEIYKVYGSSEKLFDADFVLEKSLKKNDAVVAIMKDLLDS
VKSFENYIKAFFGEGKETNRDESFYGDFVLAYDILLKVDHIYDAIRNYVTQKPYSKDKFKLYFQNPQFMGGWDKDKE
TDYRATILRYGSKYYLAIMDKKYAKCLQKIDKDDVNGNYEKINYKLLPGPNKMLPKVFFSKKWMAYYNPSEDIQKIY
KNGTFKKGDMFNLNDCHKLIDFFKDSISRYPKWSNAYDENFSETEKYKDIAGFYREVEEQGYKVSFESASKKEVDKL
VEEGKLYMFQIYNKDFSDKSHGTPNLHTMYFKLLFDENNHGQIRLSGGAELFMRRASLKKEELVVHPANSPIANKNP
DNPKKITTLSYDVYKDKRESEDQYELHIPIAINKCPKNIFKINTEVRVLLKHDDNPYVIGIDRGERNLLYIVVVDGK
GNIVEQYSLNEIINNFNGIRIKTDYHSLLDKKEKERFEARQNWTSIENIKELKAGYISQVVHKICELVEKYDAVIAL
EDLNSGFKNSRVKVEKQVYQKFEKMLIDKLNYMVDKKSNPCATGGALKGYQITNKFESFKSMSTQNGFIFYIPAWLT
SKIDPSTGFVNLLKTKYTSIADSKKFISSFDRIMYVPEEDLFEFALDYKNFSRTDADYIKKWKLYSYGNRIRIFRNP
KKNNVEDWEEVCLTSAYKELENKYGINYQQGDIRALLCEQSDKAFYSSFMALMSLMLQMRNSITGRTDVDFLISPVK
NSDGIFYDSRNYEAQENAILPKNADANGAYNIARKVLWAIGQFKKAEDEKLDKVKIAISNKEWLEYAQTSVKH
AEAAAKEAAAKEAAAKEAAAKALEAEAAAKEAAAKEAAAKEAAAKAMVSKGEEDNMAIIKEFMRFKVHMEGSVNGH
EFEIEGEGEGRPYEGTQTAKLKVTKGGPLPFAWDILSPQFMYGSKAYVKHPADIPDYLKLSFPEGFKWERVMNFED
GGVVTVTQDSSLQDGEFIYKVKLRGTNFPSDGPVMQKKTMGWEASSERMYPEDGALKGEIKQRLKLKDGGHYDAEV
KTTYKAKKPVQLPGAYNVNIKLDITSHNEDYTIVEQYERAEGRHSTGGMDELYK
SEQ ID NO: 212
MSKLEKFTNCYSLSKTLRFKAIPVGKTQENIDNKRLLVEDEKRAEDYKGVKKLLDRYYLSFINDVLHSIKLKNLNNY
ISLFRKKTRTEKENKELENLEINLRKEIAKAFKGNEGYKSLFKKDIIETILPEFLDDKDEIALVNSENGETTAFTGE
FDNRENMESEEAKSTSIAFRCINENLTRYISNMDIFEKVDAIFDKHEVQEIKEKILNSDYDVEDFFEGEFFNEVLIQ
EGIDVYNAIIGGFVTESGEKIKGLNEYINLYNQKTKQKLPKFKPLYKQVLSDRESLSFYGEGYTSDEEVLEVERNTL
NKNSEIFSSIKKLEKLFKNFDEYSSAGIFVKNGPAISTISKDIFGEWNVIRDKWNAEYDDIHLKKKAVVTEKYEDDR
RKSFKKIGSFSLEQLQEYADADLSVVEKLKEIIIQKVDEIYKVYGSSEKLFDADFVLEKSLKKNDAVVAIMKDLLDS
VKSFENYIKAFFGEGKETNRDESFYGDFVLAYDILLKVDHIYDAIRNYVTQKPYSKDKFKLYFQNPQFMGGWDKDKE
TDYRATILRYGSKYYLAIMDKKYAKCLQKIDKDDVNGNYEKINYKLLPGPNKMLPKVFFSKKWMAYYNPSEDIQKIY
KNGTFKKGDMFNLNDCHKLIDFFKDSISRYPKWSNAYDENFSETEKYKDIAGFYREVEEQGYKVSFESASKKEVDKL
VEEGKLYMFQIYNKDFSDKSHGTPNLHTMYFKLLFDENNHGQIRLSGGAELFMRRASLKKEELVVHPANSPIANKNP
DNPKKITTLSYDVYKDKRESEDQYELHIPIAINKCPKNIFKINTEVRVLLKHDDNPYVIGIDRGERNLLYIVVVDGK
GNIVEQYSLNEIINNFNGIRIKTDYHSLLDKKEKERFEARQNWTSIENIKELKAGYISQVVHKICELVEKYDAVIAL
EDLNSGFKNSRVKVEKQVYQKFEKMLIDKLNYMVDKKSNPCATGGALKGYQITNKFESFKSMSTQNGFIFYIPAWLT
SKIDPSTGFVNLLKTKYTSIADSKKFISSFDRIMYVPEEDLFEFALDYKNFSRTDADYIKKWKLYSYGNRIRIFRNP
KKNNVEDWEEVCLTSAYKELENKYGINYQQGDIRALLCEQSDKAFYSSFMALMSLMLQMRNSITGRTDVDFLISPVK
NSDGIFYDSRNYEAQENAILPKNADANGAYNIARKVLWAIGQFKKAEDEKLDKVKIAISNKEWLEYAQTSVKH
LEAEAAAKEAAAKEAAAKEAAAKALEAEAAAKEAAAKEAAAKEAAAKALEMVSKGEEDNMAIIKEFMRFKVHMEGS
VNGHEFEIEGEGEGRPYEGTQTAKLKVTKGGPLPFAWDILSPQFMYGSKAYVKHPADIPDYLKLSFPEGFKWERVM
NFEDGGVVTVTQDSSLQDGEFIYKVKLRGTNFPSDGPVMQKKTMGWEASSERMYPEDGALKGEIKQRLKLKDGGHY
DAEVKTTYKAKKPVQLPGAYNVNIKLDITSHNEDYTIVEQYERAEGRHSTGGMDELYK
SEQ ID NO: 213
MSKLEKFTNCYSLSKTLRFKAIPVGKTQENIDNKRLLVEDEKRAEDYKGVKKLLDRYYLSFINDVLHSIKLKNLNNY
ISLFRKKTRTEKENKELENLEINLRKEIAKAFKGNEGYKSLFKKDIIETILPEFLDDKDEIALVNSENGETTAFTGE
FDNRENMESEEAKSTSIAFRCINENLTRYISNMDIFEKVDAIFDKHEVQEIKEKILNSDYDVEDFFEGEFFNEVLIQ
EGIDVYNAIIGGFVTESGEKIKGLNEYINLYNQKTKQKLPKFKPLYKQVLSDRESLSFYGEGYTSDEEVLEVERNTL
NKNSEIFSSIKKLEKLFKNFDEYSSAGIFVKNGPAISTISKDIFGEWNVIRDKWNAEYDDIHLKKKAVVTEKYEDDR
RKSFKKIGSFSLEQLQEYADADLSVVEKLKEIIIQKVDEIYKVYGSSEKLFDADFVLEKSLKKNDAVVAIMKDLLDS
VKSFENYIKAFFGEGKETNRDESFYGDFVLAYDILLKVDHIYDAIRNYVTQKPYSKDKFKLYFQNPQFMGGWDKDKE
TDYRATILRYGSKYYLAIMDKKYAKCLQKIDKDDVNGNYEKINYKLLPGPNKMLPKVFFSKKWMAYYNPSEDIQKIY
KNGTFKKGDMFNLNDCHKLIDFFKDSISRYPKWSNAYDENFSETEKYKDIAGFYREVEEQGYKVSFESASKKEVDKL
VEEGKLYMFQIYNKDFSDKSHGTPNLHTMYFKLLFDENNHGQIRLSGGAELFMRRASLKKEELVVHPANSPIANKNP
DNPKKITTLSYDVYKDKRESEDQYELHIPIAINKCPKNIFKINTEVRVLLKHDDNPYVIGIDRGERNLLYIVVVDGK
GNIVEQYSLNEIINNFNGIRIKTDYHSLLDKKEKERFEARQNWTSIENIKELKAGYISQVVHKICELVEKYDAVIAL
EDLNSGFKNSRVKVEKQVYQKFEKMLIDKLNYMVDKKSNPCATGGALKGYQITNKFESFKSMSTQNGFIFYIPAWLT
SKIDPSTGFVNLLKTKYTSIADSKKFISSFDRIMYVPEEDLFEFALDYKNFSRTDADYIKKWKLYSYGNRIRIFRNP
KKNNVEDWEEVCLTSAYKELENKYGINYQQGDIRALLCEQSDKAFYSSFMALMSLMLQMRNSITGRTDVDFLISPVK
NSDGIFYDSRNYEAQENAILPKNADANGAYNIARKVLWAIGQFKKAEDEKLDKVKIAISNKEWLEYAQTSVKH
APAMVSKGEEDNMAIIKEFMRFKVHMEGSVNGHEFEIEGEGEGRPYEGTQTAKLKVTKGGPLPFAWDILSPQFMYG
SKAYVKHPADIPDYLKLSFPEGFKWERVMNFEDGGVVTVTQDSSLQDGEFIYKVKLRGTNFPSDGPVMQKKTMGWE
ASSERMYPEDGALKGEIKQRLKLKDGGHYDAEVKTTYKAKKPVQLPGAYNVNIKLDITSHNEDYTIVEQYERAEGR
HSTGGMDELYK
SEQ ID NO: 214
MSKLEKFTNCYSLSKTLRFKAIPVGKTQENIDNKRLLVEDEKRAEDYKGVKKLLDRYYLSFINDVLHSIKLKNLNNY
ISLFRKKTRTEKENKELENLEINLRKEIAKAFKGNEGYKSLFKKDIIETILPEFLDDKDEIALVNSENGETTAFTGE
FDNRENMESEEAKSTSIAFRCINENLTRYISNMDIFEKVDAIFDKHEVQEIKEKILNSDYDVEDFFEGEFFNEVLIQ
EGIDVYNAIIGGFVTESGEKIKGLNEYINLYNQKTKQKLPKFKPLYKQVLSDRESLSFYGEGYTSDEEVLEVERNTL
NKNSEIFSSIKKLEKLFKNFDEYSSAGIFVKNGPAISTISKDIFGEWNVIRDKWNAEYDDIHLKKKAVVTEKYEDDR
RKSFKKIGSFSLEQLQEYADADLSVVEKLKEIIIQKVDEIYKVYGSSEKLFDADFVLEKSLKKNDAVVAIMKDLLDS
VKSFENYIKAFFGEGKETNRDESFYGDFVLAYDILLKVDHIYDAIRNYVTQKPYSKDKFKLYFQNPQFMGGWDKDKE
TDYRATILRYGSKYYLAIMDKKYAKCLQKIDKDDVNGNYEKINYKLLPGPNKMLPKVFFSKKWMAYYNPSEDIQKIY
KNGTFKKGDMFNLNDCHKLIDFFKDSISRYPKWSNAYDENFSETEKYKDIAGFYREVEEQGYKVSFESASKKEVDKL
VEEGKLYMFQIYNKDFSDKSHGTPNLHTMYFKLLFDENNHGQIRLSGGAELFMRRASLKKEELVVHPANSPIANKNP
DNPKKITTLSYDVYKDKRESEDQYELHIPIAINKCPKNIFKINTEVRVLLKHDDNPYVIGIDRGERNLLYIVVVDGK
GNIVEQYSLNEIINNFNGIRIKTDYHSLLDKKEKERFEARQNWTSIENIKELKAGYISQVVHKICELVEKYDAVIAL
EDLNSGFKNSRVKVEKQVYQKFEKMLIDKLNYMVDKKSNPCATGGALKGYQITNKFESFKSMSTQNGFIFYIPAWLT
SKIDPSTGFVNLLKTKYTSIADSKKFISSFDRIMYVPEEDLFEFALDYKNFSRTDADYIKKWKLYSYGNRIRIFRNP
KKNNVEDWEEVCLTSAYKELENKYGINYQQGDIRALLCEQSDKAFYSSFMALMSLMLQMRNSITGRTDVDFLISPVK
NSDGIFYDSRNYEAQENAILPKNADANGAYNIARKVLWAIGQFKKAEDEKLDKVKIAISNKEWLEYAQTSVKH
APAPAMVSKGEEDNMAIIKEFMRFKVHMEGSVNGHEFEIEGEGEGRPYEGTQTAKLKVTKGGPLPFAWDILSPQFM
YGSKAYVKHPADIPDYLKLSFPEGFKWERVMNFEDGGVVTVTQDSSLQDGEFIYKVKLRGTNFPSDGPVMQKKTMG
WEASSERMYPEDGALKGEIKQRLKLKDGGHYDAEVKTTYKAKKPVQLPGAYNVNIKLDITSHNEDYTIVEQYERAE
GRHSTGGMDELYK
SEQ ID NO: 215
MSKLEKFTNCYSLSKTLRFKAIPVGKTQENIDNKRLLVEDEKRAEDYKGVKKLLDRYYLSFINDVLHSIKLKNLNNY
ISLFRKKTRTEKENKELENLEINLRKEIAKAFKGNEGYKSLFKKDIIETILPEFLDDKDEIALVNSENGETTAFTGE
FDNRENMESEEAKSTSIAFRCINENLTRYISNMDIFEKVDAIFDKHEVQEIKEKILNSDYDVEDFFEGEFFNEVLIQ
EGIDVYNAIIGGFVTESGEKIKGLNEYINLYNQKTKQKLPKFKPLYKQVLSDRESLSFYGEGYTSDEEVLEVERNTL
NKNSEIFSSIKKLEKLFKNFDEYSSAGIFVKNGPAISTISKDIFGEWNVIRDKWNAEYDDIHLKKKAVVTEKYEDDR
RKSFKKIGSFSLEQLQEYADADLSVVEKLKEIIIQKVDEIYKVYGSSEKLFDADFVLEKSLKKNDAVVAIMKDLLDS
VKSFENYIKAFFGEGKETNRDESFYGDFVLAYDILLKVDHIYDAIRNYVTQKPYSKDKFKLYFQNPQFMGGWDKDKE
TDYRATILRYGSKYYLAIMDKKYAKCLQKIDKDDVNGNYEKINYKLLPGPNKMLPKVFFSKKWMAYYNPSEDIQKIY
KNGTFKKGDMFNLNDCHKLIDFFKDSISRYPKWSNAYDENFSETEKYKDIAGFYREVEEQGYKVSFESASKKEVDKL
VEEGKLYMFQIYNKDFSDKSHGTPNLHTMYFKLLFDENNHGQIRLSGGAELFMRRASLKKEELVVHPANSPIANKNP
DNPKKITTLSYDVYKDKRESEDQYELHIPIAINKCPKNIFKINTEVRVLLKHDDNPYVIGIDRGERNLLYIVVVDGK
GNIVEQYSLNEIINNFNGIRIKTDYHSLLDKKEKERFEARQNWTSIENIKELKAGYISQVVHKICELVEKYDAVIAL
EDLNSGFKNSRVKVEKQVYQKFEKMLIDKLNYMVDKKSNPCATGGALKGYQITNKFESFKSMSTQNGFIFYIPAWLT
SKIDPSTGFVNLLKTKYTSIADSKKFISSFDRIMYVPEEDLFEFALDYKNFSRTDADYIKKWKLYSYGNRIRIFRNP
KKNNVEDWEEVCLTSAYKELENKYGINYQQGDIRALLCEQSDKAFYSSFMALMSLMLQMRNSITGRTDVDFLISPVK
NSDGIFYDSRNYEAQENAILPKNADANGAYNIARKVLWAIGQFKKAEDEKLDKVKIAISNKEWLEYAQTSVKH
APAPAPAMVSKGEEDNMAIIKEFMRFKVHMEGSVNGHEFEIEGEGEGRPYEGTQTAKLKVTKGGPLPFAWDILSPQ
FMYGSKAYVKHPADIPDYLKLSFPEGFKWERVMNFEDGGVVTVTQDSSLQDGEFIYKVKLRGTNFPSDGPVMQKKT
MGWEASSERMYPEDGALKGEIKQRLKLKDGGHYDAEVKTTYKAKKPVQLPGAYNVNIKLDITSHNEDYTIVEQYER
AEGRHSTGGMDELYK
SEQ ID NO: 216
MSKLEKFTNCYSLSKTLRFKAIPVGKTQENIDNKRLLVEDEKRAEDYKGVKKLLDRYYLSFINDVLHSIKLKNLNNY
ISLFRKKTRTEKENKELENLEINLRKEIAKAFKGNEGYKSLFKKDIIETILPEFLDDKDEIALVNSENGETTAFTGE
FDNRENMESEEAKSTSIAFRCINENLTRYISNMDIFEKVDAIFDKHEVQEIKEKILNSDYDVEDFFEGEFFNEVLIQ
EGIDVYNAIIGGFVTESGEKIKGLNEYINLYNQKTKQKLPKFKPLYKQVLSDRESLSFYGEGYTSDEEVLEVERNTL
NKNSEIFSSIKKLEKLFKNFDEYSSAGIFVKNGPAISTISKDIFGEWNVIRDKWNAEYDDIHLKKKAVVTEKYEDDR
RKSFKKIGSFSLEQLQEYADADLSVVEKLKEIIIQKVDEIYKVYGSSEKLFDADFVLEKSLKKNDAVVAIMKDLLDS
VKSFENYIKAFFGEGKETNRDESFYGDFVLAYDILLKVDHIYDAIRNYVTQKPYSKDKFKLYFQNPQFMGGWDKDKE
TDYRATILRYGSKYYLAIMDKKYAKCLQKIDKDDVNGNYEKINYKLLPGPNKMLPKVFFSKKWMAYYNPSEDIQKIY
KNGTFKKGDMFNLNDCHKLIDFFKDSISRYPKWSNAYDENFSETEKYKDIAGFYREVEEQGYKVSFESASKKEVDKL
VEEGKLYMFQIYNKDFSDKSHGTPNLHTMYFKLLFDENNHGQIRLSGGAELFMRRASLKKEELVVHPANSPIANKNP
DNPKKITTLSYDVYKDKRESEDQYELHIPIAINKCPKNIFKINTEVRVLLKHDDNPYVIGIDRGERNLLYIVVVDGK
GNIVEQYSLNEIINNFNGIRIKTDYHSLLDKKEKERFEARQNWTSIENIKELKAGYISQVVHKICELVEKYDAVIAL
EDLNSGFKNSRVKVEKQVYQKFEKMLIDKLNYMVDKKSNPCATGGALKGYQITNKFESFKSMSTQNGFIFYIPAWLT
SKIDPSTGFVNLLKTKYTSIADSKKFISSFDRIMYVPEEDLFEFALDYKNFSRTDADYIKKWKLYSYGNRIRIFRNP
KKNNVEDWEEVCLTSAYKELENKYGINYQQGDIRALLCEQSDKAFYSSFMALMSLMLQMRNSITGRTDVDFLISPVK
NSDGIFYDSRNYEAQENAILPKNADANGAYNIARKVLWAIGQFKKAEDEKLDKVKIAISNKEWLEYAQTSVKH
APAPAPAPAMVSKGEEDNMAIIKEFMRFKVHMEGSVNGHEFEIEGEGEGRPYEGTQTAKLKVTKGGPLPFAWDILS
PQFMYGSKAYVKHPADIPDYLKLSFPEGFKWERVMNFEDGGVVTVTQDSSLQDGEFIYKVKLRGTNFPSDGPVMQK
KTMGWEASSERMYPEDGALKGEIKQRLKLKDGGHYDAEVKTTYKAKKPVQLPGAYNVNIKLDITSHNEDYTIVEQY
ERAEGRHSTGGMDELYK
SEQ ID NO: 217
MSKLEKFTNCYSLSKTLRFKAIPVGKTQENIDNKRLLVEDEKRAEDYKGVKKLLDRYYLSFINDVLHSIKLKNLNNY
ISLFRKKTRTEKENKELENLEINLRKEIAKAFKGNEGYKSLFKKDIIETILPEFLDDKDEIALVNSENGETTAFTGE
FDNRENMESEEAKSTSIAFRCINENLTRYISNMDIFEKVDAIFDKHEVQEIKEKILNSDYDVEDFFEGEFFNEVLIQ
EGIDVYNAIIGGFVTESGEKIKGLNEYINLYNQKTKQKLPKFKPLYKQVLSDRESLSFYGEGYTSDEEVLEVERNTL
NKNSEIFSSIKKLEKLFKNFDEYSSAGIFVKNGPAISTISKDIFGEWNVIRDKWNAEYDDIHLKKKAVVTEKYEDDR
RKSFKKIGSFSLEQLQEYADADLSVVEKLKEIIIQKVDEIYKVYGSSEKLFDADFVLEKSLKKNDAVVAIMKDLLDS
VKSFENYIKAFFGEGKETNRDESFYGDFVLAYDILLKVDHIYDAIRNYVTQKPYSKDKFKLYFQNPQFMGGWDKDKE
TDYRATILRYGSKYYLAIMDKKYAKCLQKIDKDDVNGNYEKINYKLLPGPNKMLPKVFFSKKWMAYYNPSEDIQKIY
KNGTFKKGDMFNLNDCHKLIDFFKDSISRYPKWSNAYDENFSETEKYKDIAGFYREVEEQGYKVSFESASKKEVDKL
VEEGKLYMFQIYNKDFSDKSHGTPNLHTMYFKLLFDENNHGQIRLSGGAELFMRRASLKKEELVVHPANSPIANKNP
DNPKKITTLSYDVYKDKRESEDQYELHIPIAINKCPKNIFKINTEVRVLLKHDDNPYVIGIDRGERNLLYIVVVDGK
GNIVEQYSLNEIINNFNGIRIKTDYHSLLDKKEKERFEARQNWTSIENIKELKAGYISQVVHKICELVEKYDAVIAL
EDLNSGFKNSRVKVEKQVYQKFEKMLIDKLNYMVDKKSNPCATGGALKGYQITNKFESFKSMSTQNGFIFYIPAWLT
SKIDPSTGFVNLLKTKYTSIADSKKFISSFDRIMYVPEEDLFEFALDYKNFSRTDADYIKKWKLYSYGNRIRIFRNP
KKNNVEDWEEVCLTSAYKELENKYGINYQQGDIRALLCEQSDKAFYSSFMALMSLMLQMRNSITGRTDVDFLISPVK
NSDGIFYDSRNYEAQENAILPKNADANGAYNIARKVLWAIGQFKKAEDEKLDKVKIAISNKEWLEYAQTSVKH
APAPAPAPAPAMVSKGEEDNMAIIKEFMRFKVHMEGSVNGHEFEIEGEGEGRPYEGTQTAKLKVTKGGPLPFAWDI
LSPQFMYGSKAYVKHPADIPDYLKLSFPEGFKWERVMNFEDGGVVTVTQDSSLQDGEFIYKVKLRGTNFPSDGPVM
QKKTMGWEASSERMYPEDGALKGEIKQRLKLKDGGHYDAEVKTTYKAKKPVQLPGAYNVNIKLDITSHNEDYTIVE
QYERAEGRHSTGGMDELYK
SEQ ID NO: 218
MSKLEKFTNCYSLSKTLRFKAIPVGKTQENIDNKRLLVEDEKRAEDYKGVKKLLDRYYLSFINDVLHSIKLKNLNNY
ISLFRKKTRTEKENKELENLEINLRKEIAKAFKGNEGYKSLFKKDIIETILPEFLDDKDEIALVNSENGETTAFTGE
FDNRENMESEEAKSTSIAFRCINENLTRYISNMDIFEKVDAIFDKHEVQEIKEKILNSDYDVEDFFEGEFFNEVLIQ
EGIDVYNAIIGGFVTESGEKIKGLNEYINLYNQKTKQKLPKFKPLYKQVLSDRESLSFYGEGYTSDEEVLEVERNTL
NKNSEIFSSIKKLEKLFKNFDEYSSAGIFVKNGPAISTISKDIFGEWNVIRDKWNAEYDDIHLKKKAVVTEKYEDDR
RKSFKKIGSFSLEQLQEYADADLSVVEKLKEIIIQKVDEIYKVYGSSEKLFDADFVLEKSLKKNDAVVAIMKDLLDS
VKSFENYIKAFFGEGKETNRDESFYGDFVLAYDILLKVDHIYDAIRNYVTQKPYSKDKFKLYFQNPQFMGGWDKDKE
TDYRATILRYGSKYYLAIMDKKYAKCLQKIDKDDVNGNYEKINYKLLPGPNKMLPKVFFSKKWMAYYNPSEDIQKIY
KNGTFKKGDMFNLNDCHKLIDFFKDSISRYPKWSNAYDENFSETEKYKDIAGFYREVEEQGYKVSFESASKKEVDKL
VEEGKLYMFQIYNKDFSDKSHGTPNLHTMYFKLLFDENNHGQIRLSGGAELFMRRASLKKEELVVHPANSPIANKNP
DNPKKITTLSYDVYKDKRESEDQYELHIPIAINKCPKNIFKINTEVRVLLKHDDNPYVIGIDRGERNLLYIVVVDGK
GNIVEQYSLNEIINNFNGIRIKTDYHSLLDKKEKERFEARQNWTSIENIKELKAGYISQVVHKICELVEKYDAVIAL
EDLNSGFKNSRVKVEKQVYQKFEKMLIDKLNYMVDKKSNPCATGGALKGYQITNKFESFKSMSTQNGFIFYIPAWLT
SKIDPSTGFVNLLKTKYTSIADSKKFISSFDRIMYVPEEDLFEFALDYKNFSRTDADYIKKWKLYSYGNRIRIFRNP
KKNNVEDWEEVCLTSAYKELENKYGINYQQGDIRALLCEQSDKAFYSSFMALMSLMLQMRNSITGRTDVDFLISPVK
NSDGIFYDSRNYEAQENAILPKNADANGAYNIARKVLWAIGQFKKAEDEKLDKVKIAISNKEWLEYAQTSVKH
APAPAPAPAPAPAMVSKGEEDNMAIIKEFMRFKVHMEGSVNGHEFEIEGEGEGRPYEGTQTAKLKVTKGGPLPFAW
DILSPQFMYGSKAYVKHPADIPDYLKLSFPEGFKWERVMNFEDGGVVTVTQDSSLQDGEFIYKVKLRGTNFPSDGP
VMQKKTMGWEASSERMYPEDGALKGEIKQRLKLKDGGHYDAEVKTTYKAKKPVQLPGAYNVNIKLDITSHNEDYTI
VEQYERAEGRHSTGGMDELYK
SEQ ID NO: 219
MSKLEKFTNCYSLSKTLRFKAIPVGKTQENIDNKRLLVEDEKRAEDYKGVKKLLDRYYLSFINDVLHSIKLKNLNNY
ISLFRKKTRTEKENKELENLEINLRKEIAKAFKGNEGYKSLFKKDIIETILPEFLDDKDEIALVNSENGETTAFTGE
FDNRENMESEEAKSTSIAFRCINENLTRYISNMDIFEKVDAIFDKHEVQEIKEKILNSDYDVEDFFEGEFFNEVLIQ
EGIDVYNAIIGGFVTESGEKIKGLNEYINLYNQKTKQKLPKFKPLYKQVLSDRESLSFYGEGYTSDEEVLEVERNTL
NKNSEIFSSIKKLEKLFKNFDEYSSAGIFVKNGPAISTISKDIFGEWNVIRDKWNAEYDDIHLKKKAVVTEKYEDDR
RKSFKKIGSFSLEQLQEYADADLSVVEKLKEIIIQKVDEIYKVYGSSEKLFDADFVLEKSLKKNDAVVAIMKDLLDS
VKSFENYIKAFFGEGKETNRDESFYGDFVLAYDILLKVDHIYDAIRNYVTQKPYSKDKFKLYFQNPQFMGGWDKDKE
TDYRATILRYGSKYYLAIMDKKYAKCLQKIDKDDVNGNYEKINYKLLPGPNKMLPKVFFSKKWMAYYNPSEDIQKIY
KNGTFKKGDMFNLNDCHKLIDFFKDSISRYPKWSNAYDENFSETEKYKDIAGFYREVEEQGYKVSFESASKKEVDKL
VEEGKLYMFQIYNKDFSDKSHGTPNLHTMYFKLLFDENNHGQIRLSGGAELFMRRASLKKEELVVHPANSPIANKNP
DNPKKITTLSYDVYKDKRESEDQYELHIPIAINKCPKNIFKINTEVRVLLKHDDNPYVIGIDRGERNLLYIVVVDGK
GNIVEQYSLNEIINNFNGIRIKTDYHSLLDKKEKERFEARQNWTSIENIKELKAGYISQVVHKICELVEKYDAVIAL
EDLNSGFKNSRVKVEKQVYQKFEKMLIDKLNYMVDKKSNPCATGGALKGYQITNKFESFKSMSTQNGFIFYIPAWLT
SKIDPSTGFVNLLKTKYTSIADSKKFISSFDRIMYVPEEDLFEFALDYKNFSRTDADYIKKWKLYSYGNRIRIFRNP
KKNNVEDWEEVCLTSAYKELENKYGINYQQGDIRALLCEQSDKAFYSSFMALMSLMLQMRNSITGRTDVDFLISPVK
NSDGIFYDSRNYEAQENAILPKNADANGAYNIARKVLWAIGQFKKAEDEKLDKVKIAISNKEWLEYAQTSVKH
APAPAPAPAPAPAPAMVSKGEEDNMAIIKEFMRFKVHMEGSVNGHEFEIEGEGEGRPYEGTQTAKLKVTKGGPLPF
AWDILSPQFMYGSKAYVKHPADIPDYLKLSFPEGFKWERVMNFEDGGVVTVTQDSSLQDGEFIYKVKLRGTNFPSD
GPVMQKKTMGWEASSERMYPEDGALKGEIKQRLKLKDGGHYDAEVKTTYKAKKPVQLPGAYNVNIKLDITSHNEDY
TIVEQYERAEGRHSTGGMDELYK
SEQ ID NO: 220
MSKLEKFTNCYSLSKTLRFKAIPVGKTQENIDNKRLLVEDEKRAEDYKGVKKLLDRYYLSFINDVLHSIKLKNLNNY
ISLFRKKTRTEKENKELENLEINLRKEIAKAFKGNEGYKSLFKKDIIETILPEFLDDKDEIALVNSENGETTAFTGE
FDNRENMESEEAKSTSIAFRCINENLTRYISNMDIFEKVDAIFDKHEVQEIKEKILNSDYDVEDFFEGEFFNEVLIQ
EGIDVYNAIIGGFVTESGEKIKGLNEYINLYNQKTKQKLPKFKPLYKQVLSDRESLSFYGEGYTSDEEVLEVERNTL
NKNSEIFSSIKKLEKLFKNFDEYSSAGIFVKNGPAISTISKDIFGEWNVIRDKWNAEYDDIHLKKKAVVTEKYEDDR
RKSFKKIGSFSLEQLQEYADADLSVVEKLKEIIIQKVDEIYKVYGSSEKLFDADFVLEKSLKKNDAVVAIMKDLLDS
VKSFENYIKAFFGEGKETNRDESFYGDFVLAYDILLKVDHIYDAIRNYVTQKPYSKDKFKLYFQNPQFMGGWDKDKE
TDYRATILRYGSKYYLAIMDKKYAKCLQKIDKDDVNGNYEKINYKLLPGPNKMLPKVFFSKKWMAYYNPSEDIQKIY
KNGTFKKGDMFNLNDCHKLIDFFKDSISRYPKWSNAYDENFSETEKYKDIAGFYREVEEQGYKVSFESASKKEVDKL
VEEGKLYMFQIYNKDFSDKSHGTPNLHTMYFKLLFDENNHGQIRLSGGAELFMRRASLKKEELVVHPANSPIANKNP
DNPKKITTLSYDVYKDKRESEDQYELHIPIAINKCPKNIFKINTEVRVLLKHDDNPYVIGIDRGERNLLYIVVVDGK
GNIVEQYSLNEIINNFNGIRIKTDYHSLLDKKEKERFEARQNWTSIENIKELKAGYISQVVHKICELVEKYDAVIAL
EDLNSGFKNSRVKVEKQVYQKFEKMLIDKLNYMVDKKSNPCATGGALKGYQITNKFESFKSMSTQNGFIFYIPAWLT
SKIDPSTGFVNLLKTKYTSIADSKKFISSFDRIMYVPEEDLFEFALDYKNFSRTDADYIKKWKLYSYGNRIRIFRNP
KKNNVEDWEEVCLTSAYKELENKYGINYQQGDIRALLCEQSDKAFYSSFMALMSLMLQMRNSITGRTDVDFLISPVK
NSDGIFYDSRNYEAQENAILPKNADANGAYNIARKVLWAIGQFKKAEDEKLDKVKIAISNKEWLEYAQTSVKH
APAPAPAPAPAPAPAPAMVSKGEEDNMAIIKEFMRFKVHMEGSVNGHEFEIEGEGEGRPYEGTQTAKLKVTKGGPL
PFAWDILSPQFMYGSKAYVKHPADIPDYLKLSFPEGFKWERVMNFEDGGVVTVTQDSSLQDGEFIYKVKLRGTNFP
SDGPVMQKKTMGWEASSERMYPEDGALKGEIKQRLKLKDGGHYDAEVKTTYKAKKPVQLPGAYNVNIKLDITSHNE
DYTIVEQYERAEGRHSTGGMDELYK
SEQ ID NO: 221
MSKLEKFTNCYSLSKTLRFKAIPVGKTQENIDNKRLLVEDEKRAEDYKGVKKLLDRYYLSFINDVLHSIKLKNLNNY
ISLFRKKTRTEKENKELENLEINLRKEIAKAFKGNEGYKSLFKKDIIETILPEFLDDKDEIALVNSENGETTAFTGE
FDNRENMESEEAKSTSIAFRCINENLTRYISNMDIFEKVDAIFDKHEVQEIKEKILNSDYDVEDFFEGEFFNEVLIQ
EGIDVYNAIIGGFVTESGEKIKGLNEYINLYNQKTKQKLPKFKPLYKQVLSDRESLSFYGEGYTSDEEVLEVERNTL
NKNSEIFSSIKKLEKLFKNFDEYSSAGIFVKNGPAISTISKDIFGEWNVIRDKWNAEYDDIHLKKKAVVTEKYEDDR
RKSFKKIGSFSLEQLQEYADADLSVVEKLKEIIIQKVDEIYKVYGSSEKLFDADFVLEKSLKKNDAVVAIMKDLLDS
VKSFENYIKAFFGEGKETNRDESFYGDFVLAYDILLKVDHIYDAIRNYVTQKPYSKDKFKLYFQNPQFMGGWDKDKE
TDYRATILRYGSKYYLAIMDKKYAKCLQKIDKDDVNGNYEKINYKLLPGPNKMLPKVFFSKKWMAYYNPSEDIQKIY
KNGTFKKGDMFNLNDCHKLIDFFKDSISRYPKWSNAYDENFSETEKYKDIAGFYREVEEQGYKVSFESASKKEVDKL
VEEGKLYMFQIYNKDFSDKSHGTPNLHTMYFKLLFDENNHGQIRLSGGAELFMRRASLKKEELVVHPANSPIANKNP
DNPKKITTLSYDVYKDKRESEDQYELHIPIAINKCPKNIFKINTEVRVLLKHDDNPYVIGIDRGERNLLYIVVVDGK
GNIVEQYSLNEIINNFNGIRIKTDYHSLLDKKEKERFEARQNWTSIENIKELKAGYISQVVHKICELVEKYDAVIAL
EDLNSGFKNSRVKVEKQVYQKFEKMLIDKLNYMVDKKSNPCATGGALKGYQITNKFESFKSMSTQNGFIFYIPAWLT
SKIDPSTGFVNLLKTKYTSIADSKKFISSFDRIMYVPEEDLFEFALDYKNFSRTDADYIKKWKLYSYGNRIRIFRNP
KKNNVEDWEEVCLTSAYKELENKYGINYQQGDIRALLCEQSDKAFYSSFMALMSLMLQMRNSITGRTDVDFLISPVK
NSDGIFYDSRNYEAQENAILPKNADANGAYNIARKVLWAIGQFKKAEDEKLDKVKIAISNKEWLEYAQTSVKH
APAPAPAPAPAPAPAPAPAMVSKGEEDNMAIIKEFMRFKVHMEGSVNGHEFEIEGEGEGRPYEGTQTAKLKVTKGG
PLPFAWDILSPQFMYGSKAYVKHPADIPDYLKLSFPEGFKWERVMNFEDGGVVTVTQDSSLQDGEFIYKVKLRGTN
FPSDGPVMQKKTMGWEASSERMYPEDGALKGEIKQRLKLKDGGHYDAEVKTTYKAKKPVQLPGAYNVNIKLDITSH
NEDYTIVEQYERAEGRHSTGGMDELYK
SEQ ID NO: 222
MSKLEKFTNCYSLSKTLRFKAIPVGKTQENIDNKRLLVEDEKRAEDYKGVKKLLDRYYLSFINDVLHSIKLKNLNNY
ISLFRKKTRTEKENKELENLEINLRKEIAKAFKGNEGYKSLFKKDIIETILPEFLDDKDEIALVNSENGETTAFTGE
FDNRENMESEEAKSTSIAFRCINENLTRYISNMDIFEKVDAIFDKHEVQEIKEKILNSDYDVEDFFEGEFFNEVLIQ
EGIDVYNAIIGGFVTESGEKIKGLNEYINLYNQKTKQKLPKFKPLYKQVLSDRESLSFYGEGYTSDEEVLEVERNTL
NKNSEIFSSIKKLEKLFKNFDEYSSAGIFVKNGPAISTISKDIFGEWNVIRDKWNAEYDDIHLKKKAVVTEKYEDDR
RKSFKKIGSFSLEQLQEYADADLSVVEKLKEIIIQKVDEIYKVYGSSEKLFDADFVLEKSLKKNDAVVAIMKDLLDS
VKSFENYIKAFFGEGKETNRDESFYGDFVLAYDILLKVDHIYDAIRNYVTQKPYSKDKFKLYFQNPQFMGGWDKDKE
TDYRATILRYGSKYYLAIMDKKYAKCLQKIDKDDVNGNYEKINYKLLPGPNKMLPKVFFSKKWMAYYNPSEDIQKIY
KNGTFKKGDMFNLNDCHKLIDFFKDSISRYPKWSNAYDENFSETEKYKDIAGFYREVEEQGYKVSFESASKKEVDKL
VEEGKLYMFQIYNKDFSDKSHGTPNLHTMYFKLLFDENNHGQIRLSGGAELFMRRASLKKEELVVHPANSPIANKNP
DNPKKITTLSYDVYKDKRESEDQYELHIPIAINKCPKNIFKINTEVRVLLKHDDNPYVIGIDRGERNLLYIVVVDGK
GNIVEQYSLNEIINNFNGIRIKTDYHSLLDKKEKERFEARQNWTSIENIKELKAGYISQVVHKICELVEKYDAVIAL
EDLNSGFKNSRVKVEKQVYQKFEKMLIDKLNYMVDKKSNPCATGGALKGYQITNKFESFKSMSTQNGFIFYIPAWLT
SKIDPSTGFVNLLKTKYTSIADSKKFISSFDRIMYVPEEDLFEFALDYKNFSRTDADYIKKWKLYSYGNRIRIFRNP
KKNNVEDWEEVCLTSAYKELENKYGINYQQGDIRALLCEQSDKAFYSSFMALMSLMLQMRNSITGRTDVDFLISPVK
NSDGIFYDSRNYEAQENAILPKNADANGAYNIARKVLWAIGQFKKAEDEKLDKVKIAISNKEWLEYAQTSVKH
APAPAPAPAPAPAPAPAPAPAMVSKGEEDNMAIIKEFMRFKVHMEGSVNGHEFEIEGEGEGRPYEGTQTAKLKVTK
GGPLPFAWDILSPQFMYGSKAYVKHPADIPDYLKLSFPEGFKWERVMNFEDGGVVTVTQDSSLQDGEFIYKVKLRG
TNFPSDGPVMQKKTMGWEASSERMYPEDGALKGEIKQRLKLKDGGHYDAEVKTTYKAKKPVQLPGAYNVNIKLDIT
SHNEDYTIVEQYERAEGRHSTGGMDELYK
SEQ ID NO: 223
MSKLEKFTNCYSLSKTLRFKAIPVGKTQENIDNKRLLVEDEKRAEDYKGVKKLLDRYYLSFINDVLHSIKLKNLNNY
ISLFRKKTRTEKENKELENLEINLRKEIAKAFKGNEGYKSLFKKDIIETILPEFLDDKDEIALVNSENGETTAFTGE
FDNRENMESEEAKSTSIAFRCINENLTRYISNMDIFEKVDAIFDKHEVQEIKEKILNSDYDVEDFFEGEFFNEVLIQ
EGIDVYNAIIGGFVTESGEKIKGLNEYINLYNQKTKQKLPKFKPLYKQVLSDRESLSFYGEGYTSDEEVLEVERNTL
NKNSEIFSSIKKLEKLFKNFDEYSSAGIFVKNGPAISTISKDIFGEWNVIRDKWNAEYDDIHLKKKAVVTEKYEDDR
RKSFKKIGSFSLEQLQEYADADLSVVEKLKEIIIQKVDEIYKVYGSSEKLFDADFVLEKSLKKNDAVVAIMKDLLDS
VKSFENYIKAFFGEGKETNRDESFYGDFVLAYDILLKVDHIYDAIRNYVTQKPYSKDKFKLYFQNPQFMGGWDKDKE
TDYRATILRYGSKYYLAIMDKKYAKCLQKIDKDDVNGNYEKINYKLLPGPNKMLPKVFFSKKWMAYYNPSEDIQKIY
KNGTFKKGDMFNLNDCHKLIDFFKDSISRYPKWSNAYDENFSETEKYKDIAGFYREVEEQGYKVSFESASKKEVDKL
VEEGKLYMFQIYNKDFSDKSHGTPNLHTMYFKLLFDENNHGQIRLSGGAELFMRRASLKKEELVVHPANSPIANKNP
DNPKKITTLSYDVYKDKRESEDQYELHIPIAINKCPKNIFKINTEVRVLLKHDDNPYVIGIDRGERNLLYIVVVDGK
GNIVEQYSLNEIINNFNGIRIKTDYHSLLDKKEKERFEARQNWTSIENIKELKAGYISQVVHKICELVEKYDAVIAL
EDLNSGFKNSRVKVEKQVYQKFEKMLIDKLNYMVDKKSNPCATGGALKGYQITNKFESFKSMSTQNGFIFYIPAWLT
SKIDPSTGFVNLLKTKYTSIADSKKFISSFDRIMYVPEEDLFEFALDYKNFSRTDADYIKKWKLYSYGNRIRIFRNP
KKNNVEDWEEVCLTSAYKELENKYGINYQQGDIRALLCEQSDKAFYSSFMALMSLMLQMRNSITGRTDVDFLISPVK
NSDGIFYDSRNYEAQENAILPKNADANGAYNIARKVLWAIGQFKKAEDEKLDKVKIAISNKEWLEYAQTSVKH
APAPAPAPAPAPAPAPAPAPAPAMVSKGEEDNMAIIKEFMRFKVHMEGSVNGHEFEIEGEGEGRPYEGTQTAKLKV
TKGGPLPFAWDILSPQFMYGSKAYVKHPADIPDYLKLSFPEGFKWERVMNFEDGGVVTVTQDSSLQDGEFIYKVKL
RGTNFPSDGPVMQKKTMGWEASSERMYPEDGALKGEIKQRLKLKDGGHYDAEVKTTYKAKKPVQLPGAYNVNIKLD
ITSHNEDYTIVEQYERAEGRHSTGGMDELYK
SEQ ID NO: 224
MSKLEKFTNCYSLSKTLRFKAIPVGKTQENIDNKRLLVEDEKRAEDYKGVKKLLDRYYLSFINDVLHSIKLKNLNNY
ISLFRKKTRTEKENKELENLEINLRKEIAKAFKGNEGYKSLFKKDIIETILPEFLDDKDEIALVNSENGETTAFTGE
FDNRENMESEEAKSTSIAFRCINENLTRYISNMDIFEKVDAIFDKHEVQEIKEKILNSDYDVEDFFEGEFFNEVLIQ
EGIDVYNAIIGGFVTESGEKIKGLNEYINLYNQKTKQKLPKFKPLYKQVLSDRESLSFYGEGYTSDEEVLEVERNTL
NKNSEIFSSIKKLEKLFKNFDEYSSAGIFVKNGPAISTISKDIFGEWNVIRDKWNAEYDDIHLKKKAVVTEKYEDDR
RKSFKKIGSFSLEQLQEYADADLSVVEKLKEIIIQKVDEIYKVYGSSEKLFDADFVLEKSLKKNDAVVAIMKDLLDS
VKSFENYIKAFFGEGKETNRDESFYGDFVLAYDILLKVDHIYDAIRNYVTQKPYSKDKFKLYFQNPQFMGGWDKDKE
TDYRATILRYGSKYYLAIMDKKYAKCLQKIDKDDVNGNYEKINYKLLPGPNKMLPKVFFSKKWMAYYNPSEDIQKIY
KNGTFKKGDMFNLNDCHKLIDFFKDSISRYPKWSNAYDFNFSETEKYKDIAGFYREVEEQGYKVSFESASKKEVDKL
VEEGKLYMFQIYNKDFSDKSHGTPNLHTMYFKLLFDENNHGQIRLSGGAELFMRRASLKKEELVVHPANSPIANKNP
DNPKKITTLSYDVYKDKRFSEDQYELHIPIAINKCPKNIFKINTEVRVLLKHDDNPYVIGIDRGERNLLYIVVVDGK
GNIVEQYSLNEIINNFNGIRIKTDYHSLLDKKEKERFEARQNWTSIENIKELKAGYISQVVHKICELVEKYDAVIAL
EDLNSGFKNSRVKVEKQVYQKFEKMLIDKLNYMVDKKSNPCATGGALKGYQITNKFESFKSMSTQNGFIFYIPAWLT
SKIDPSTGFVNLLKTKYTSIADSKKFISSFDRIMYVPEEDLFEFALDYKNFSRTDADYIKKWKLYSYGNRIRIFRNP
KKNNVFDWEEVCLTSAYKELFNKYGINYQQGDIRALLCEQSDKAFYSSFMALMSLMLQMRNSITGRTDVDFLISPVK
NSDGIFYDSRNYEAQENAILPKNADANGAYNIARKVLWAIGQFKKAEDEKLDKVKIAISNKEWLEYAQTSVKH
APAPAPAPAPAPAPAPAPAPAPAPAMVSKGEEDNMAIIKEFMRFKVHMEGSVNGHEFEIEGEGEGRPYEGTQTAKL
KVTKGGPLPFAWDILSPQFMYGSKAYVKHPADIPDYLKLSFPEGFKWERVMNFEDGGVVTVTQDSSLQDGEFIYKV
KLRGTNFPSDGPVMQKKTMGWEASSERMYPEDGALKGEIKQRLKLKDGGHYDAEVKTTYKAKKPVQLPGAYNVNIK
LDITSHNEDYTIVEQYERAEGRHSTGGMDELYK
SEQ ID NO: 225
MSKLEKFTNCYSLSKTLRFKAIPVGKTQENIDNKRLLVEDEKRAEDYKGVKKLLDRYYLSFINDVLHSIKLKNLNNY
ISLERKKIRTEKENKELENLEINLRKEIAKAFKGNEGYKSLFKKDIIETILPEFLDDKDEIALVNSENGETTAFTGF
FDNRENMFSEEAKSTSIAFRCINENLTRYISNMDIFEKVDAIFDKHEVQEIKEKILNSDYDVEDFFEGEFFNFVLIQ
EGIDVYNAIIGGFVTESGEKIKGLNEYINLYNQKTKQKLPKFKPLYKQVLSDRESLSFYGEGYISDEEVLEVERNIL
NKNSEIFSSIKKLEKLFKNFDEYSSAGIFVKNGPAISTISKDIFGEWNVIRDKWNAEYDDIHLKKKAVVTEKYEDDR
RKSFKKIGSFSLEQLQEYADADLSVVEKLKEIIIQKVDEIYKVYGSSEKLFDADFVLEKSLKKNDAVVAIMKDLLDS
VKSFENYIKAFFGEGKETNRDESFYGDFVLAYDILLKVDHIYDAIRNYVTQKPYSKDKFKLYFQNPQFMGGWDKDKE
TDYRATILRYGSKYYLAIMDKKYAKCLQKIDKDDVNGNYEKINYKLLPGPNKMLPKVFFSKKWMAYYNPSEDIQKIY
KNGTFKKGDMFNLNDCHKLIDFFKDSISRYPKWSNAYDFNFSETEKYKDIAGFYREVEEQGYKVSFESASKKEVDKL
VEEGKLYMFQIYNKDFSDKSHGTPNLHTMYFKLLFDENNHGQIRLSGGAELFMRRASLKKEELVVHPANSPIANKNP
DNPKKITTLSYDVYKDKRFSEDQYELHIPIAINKCPKNIFKINTEVRVLLKHDDNPYVIGIDRGERNLLYIVVVDGK
GNIVEQYSLNEIINNFNGIRIKTDYHSLLDKKEKERFEARQNWTSIENIKELKAGYISQVVHKICELVEKYDAVIAL
EDLNSGFKNSRVKVEKQVYQKFEKMLIDKLNYMVDKKSNPCATGGALKGYQITNKFESFKSMSTQNGFIFYIPAWLT
SKIDPSTGFVNLLKTKYTSIADSKKFISSFDRIMYVPEEDLFEFALDYKNFSRTDADYIKKWKLYSYGNRIRIFRNP
KKNNVFDWEEVCLTSAYKELFNKYGINYQQGDIRALLCEQSDKAFYSSFMALMSLMLQMRNSITGRTDVDFLISPVK
NSDGIFYDSRNYEAQENAILPKNADANGAYNIARKVLWAIGQFKKAEDEKLDKVKIAISNKEWLEYAQTSVKH
APAPAPAPAPAPAPAPAPAPAPAPAPAMVSKGEEDNMAIIKEFMRFKVHMEGSVNGHEFEIEGEGEGRPYEGTQTA
KLKVTKGGPLPFAWDILSPQFMYGSKAYVKHPADIPDYLKLSFPEGFKWERVMNFEDGGVVTVTQDSSLQDGEFIY
KVKLRGTNFPSDGPVMQKKTMGWEASSERMYPEDGALKGEIKQRLKLKDGGHYDAEVKTTYKAKKPVQLPGAYNVN
IKLDITSHNEDYTIVEQYERAEGRHSTGGMDELYK
SEQ ID NO: 226
MSKLEKFTNCYSLSKTLRFKAIPVGKTQENIDNKRLLVEDEKRAEDYKGVKKLLDRYYLSFINDVLHSIKLKNLNNY
ISLERKKIRTEKENKELENLEINLRKEIAKAFKGNEGYKSLFKKDIIETILPEFLDDKDEIALVNSENGETTAFTGF
FDNRENMFSEEAKSTSIAFRCINENLTRYISNMDIFEKVDAIFDKHEVQEIKEKILNSDYDVEDFFEGEFFNFVLIQ
EGIDVYNAIIGGFVTESGEKIKGLNEYINLYNQKTKQKLPKFKPLYKQVLSDRESLSFYGEGYISDEEVLEVERNIL
NKNSEIFSSIKKLEKLFKNFDEYSSAGIFVKNGPAISTISKDIFGEWNVIRDKWNAEYDDIHLKKKAVVTEKYEDDR
RKSFKKIGSFSLEQLQEYADADLSVVEKLKEIIIQKVDEIYKVYGSSEKLFDADFVLEKSLKKNDAVVAIMKDLLDS
VKSFENYIKAFFGEGKETNRDESFYGDFVLAYDILLKVDHIYDAIRNYVTQKPYSKDKFKLYFQNPQFMGGWDKDKE
TDYRATILRYGSKYYLAIMDKKYAKCLQKIDKDDVNGNYEKINYKLLPGPNKMLPKVFFSKKWMAYYNPSEDIQKIY
KNGTFKKGDMFNLNDCHKLIDFFKDSISRYPKWSNAYDFNFSETEKYKDIAGFYREVEEQGYKVSFESASKKEVDKL
VEEGKLYMFQIYNKDFSDKSHGTPNLHTMYFKLLFDENNHGQIRLSGGAELFMRRASLKKEELVVHPANSPIANKNP
DNPKKITTLSYDVYKDKRFSEDQYELHIPIAINKCPKNIFKINTEVRVLLKHDDNPYVIGIDRGERNLLYIVVVDGK
GNIVEQYSLNEIINNFNGIRIKTDYHSLLDKKEKERFEARQNWTSIENIKELKAGYISQVVHKICELVEKYDAVIAL
EDLNSGFKNSRVKVEKQVYQKFEKMLIDKLNYMVDKKSNPCATGGALKGYQITNKFESFKSMSTQNGFIFYIPAWLT
SKIDPSTGFVNLLKTKYTSIADSKKFISSFDRIMYVPEEDLFEFALDYKNFSRTDADYIKKWKLYSYGNRIRIFRNP
KKNNVEDWEEVCLTSAYKELENKYGINYQQGDIRALLCEQSDKAFYSSFMALMSLMLQMRNSITGRTDVDFLISPVK
NSDGIFYDSRNYEAQENAILPKNADANGAYNIARKVLWAIGQFKKAEDEKLDKVKIAISNKEWLEYAQTSVKH
APAPAPAPAPAPAPAPAPAPAPAPAPAPAMVSKGEEDNMAIIKEFMRFKVHMEGSVNGHEFEIEGEGEGRPYEGTQ
TAKLKVTKGGPLPFAWDILSPQFMYGSKAYVKHPADIPDYLKLSFPEGFKWERVMNFEDGGVVTVTQDSSLQDGEF
IYKVKLRGTNFPSDGPVMQKKTMGWEASSERMYPEDGALKGEIKQRLKLKDGGHYDAEVKTTYKAKKPVQLPGAYN
VNIKLDITSHNEDYTIVEQYERAEGRHSTGGMDELYK
SEQ ID NO: 227
MSKLEKFTNCYSLSKTLRFKAIPVGKTQENIDNKRLLVEDEKRAEDYKGVKKLLDRYYLSFINDVLHSIKLKNLNNY
ISLFRKKTRTEKENKELENLEINLRKEIAKAFKGNEGYKSLFKKDIIETILPEFLDDKDEIALVNSENGETTAFTGE
FDNRENMESEEAKSTSIAFRCINENLTRYISNMDIFEKVDAIFDKHEVQEIKEKILNSDYDVEDFFEGEFFNEVLIQ
EGIDVYNAIIGGFVTESGEKIKGLNEYINLYNQKTKQKLPKFKPLYKQVLSDRESLSFYGEGYTSDEEVLEVERNTL
NKNSEIFSSIKKLEKLFKNFDEYSSAGIFVKNGPAISTISKDIFGEWNVIRDKWNAEYDDIHLKKKAVVTEKYEDDR
RKSFKKIGSFSLEQLQEYADADLSVVEKLKEIIIQKVDEIYKVYGSSEKLFDADFVLEKSLKKNDAVVAIMKDLLDS
VKSFENYIKAFFGEGKETNRDESFYGDFVLAYDILLKVDHIYDAIRNYVTQKPYSKDKFKLYFQNPQFMGGWDKDKE
TDYRATILRYGSKYYLAIMDKKYAKCLQKIDKDDVNGNYEKINYKLLPGPNKMLPKVFFSKKWMAYYNPSEDIQKIY
KNGTFKKGDMFNLNDCHKLIDFFKDSISRYPKWSNAYDENFSETEKYKDIAGFYREVEEQGYKVSFESASKKEVDKL
VEEGKLYMFQIYNKDFSDKSHGTPNLHTMYFKLLFDENNHGQIRLSGGAELFMRRASLKKEELVVHPANSPIANKNP
DNPKKITTLSYDVYKDKRESEDQYELHIPIAINKCPKNIFKINTEVRVLLKHDDNPYVIGIDRGERNLLYIVVVDGK
GNIVEQYSLNEIINNFNGIRIKTDYHSLLDKKEKERFEARQNWTSIENIKELKAGYISQVVHKICELVEKYDAVIAL
EDLNSGFKNSRVKVEKQVYQKFEKMLIDKLNYMVDKKSNPCATGGALKGYQITNKFESFKSMSTQNGFIFYIPAWLT
SKIDPSTGFVNLLKTKYTSIADSKKFISSFDRIMYVPEEDLFEFALDYKNFSRTDADYIKKWKLYSYGNRIRIFRNP
KKNNVEDWEEVCLTSAYKELENKYGINYQQGDIRALLCEQSDKAFYSSFMALMSLMLQMRNSITGRTDVDFLISPVK
NSDGIFYDSRNYEAQENAILPKNADANGAYNIARKVLWAIGQFKKAEDEKLDKVKIAISNKEWLEYAQTSVKH
XPMVSKGEEDNMAIIKEFMRFKVHMEGSVNGHEFEIEGEGEGRPYEGTQTAKLKVTKGGPLPFAWDILSPQFMYGS
KAYVKHPADIPDYLKLSFPEGFKWERVMNFEDGGVVTVTQDSSLQDGEFIYKVKLRGTNFPSDGPVMQKKTMGWEA
SSERMYPEDGALKGEIKQRLKLKDGGHYDAEVKTTYKAKKPVQLPGAYNVNIKLDITSHNEDYTIVEQYERAEGRH
STGGMDELYK
SEQ ID NO: 228
MSKLEKFTNCYSLSKTLRFKAIPVGKTQENIDNKRLLVEDEKRAEDYKGVKKLLDRYYLSFINDVLHSIKLKNLNNY
ISLFRKKTRTEKENKELENLEINLRKEIAKAFKGNEGYKSLFKKDIIETILPEFLDDKDEIALVNSENGETTAFTGE
FDNRENMESEEAKSTSIAFRCINENLTRYISNMDIFEKVDAIFDKHEVQEIKEKILNSDYDVEDFFEGEFFNEVLIQ
EGIDVYNAIIGGFVTESGEKIKGLNEYINLYNQKTKQKLPKFKPLYKQVLSDRESLSFYGEGYTSDEEVLEVERNTL
NKNSEIFSSIKKLEKLFKNFDEYSSAGIFVKNGPAISTISKDIFGEWNVIRDKWNAEYDDIHLKKKAVVTEKYEDDR
RKSFKKIGSFSLEQLQEYADADLSVVEKLKEIIIQKVDEIYKVYGSSEKLFDADFVLEKSLKKNDAVVAIMKDLLDS
VKSFENYIKAFFGEGKETNRDESFYGDFVLAYDILLKVDHIYDAIRNYVTQKPYSKDKFKLYFQNPQFMGGWDKDKE
TDYRATILRYGSKYYLAIMDKKYAKCLQKIDKDDVNGNYEKINYKLLPGPNKMLPKVFFSKKWMAYYNPSEDIQKIY
KNGTFKKGDMFNLNDCHKLIDFFKDSISRYPKWSNAYDENFSETEKYKDIAGFYREVEEQGYKVSFESASKKEVDKL
VEEGKLYMFQIYNKDFSDKSHGTPNLHTMYFKLLFDENNHGQIRLSGGAELFMRRASLKKEELVVHPANSPIANKNP
DNPKKITTLSYDVYKDKRESEDQYELHIPIAINKCPKNIFKINTEVRVLLKHDDNPYVIGIDRGERNLLYIVVVDGK
GNIVEQYSLNEIINNFNGIRIKTDYHSLLDKKEKERFEARQNWTSIENIKELKAGYISQVVHKICELVEKYDAVIAL
EDLNSGFKNSRVKVEKQVYQKFEKMLIDKLNYMVDKKSNPCATGGALKGYQITNKFESFKSMSTQNGFIFYIPAWLT
SKIDPSTGFVNLLKTKYTSIADSKKFISSFDRIMYVPEEDLFEFALDYKNFSRTDADYIKKWKLYSYGNRIRIFRNP
KKNNVEDWEEVCLTSAYKELENKYGINYQQGDIRALLCEQSDKAFYSSFMALMSLMLQMRNSITGRTDVDFLISPVK
NSDGIFYDSRNYEAQENAILPKNADANGAYNIARKVLWAIGQFKKAEDEKLDKVKIAISNKEWLEYAQTSVKH
XPXPMVSKGEEDNMAIIKEFMRFKVHMEGSVNGHEFEIEGEGEGRPYEGTQTAKLKVTKGGPLPFAWDILSPQFMY
GSKAYVKHPADIPDYLKLSFPEGFKWERVMNFEDGGVVTVTQDSSLQDGEFIYKVKLRGTNFPSDGPVMQKKTMGW
EASSERMYPEDGALKGEIKQRLKLKDGGHYDAEVKTTYKAKKPVQLPGAYNVNIKLDITSHNEDYTIVEQYERAEG
RHSTGGMDELYK
SEQ ID NO: 229
MSKLEKFTNCYSLSKTLRFKAIPVGKTQENIDNKRLLVEDEKRAEDYKGVKKLLDRYYLSFINDVLHSIKLKNLNNY
ISLFRKKTRTEKENKELENLEINLRKEIAKAFKGNEGYKSLFKKDIIETILPEFLDDKDEIALVNSENGETTAFTGE
FDNRENMESEEAKSTSIAFRCINENLTRYISNMDIFEKVDAIFDKHEVQEIKEKILNSDYDVEDFFEGEFFNEVLIQ
EGIDVYNAIIGGFVTESGEKIKGLNEYINLYNQKTKQKLPKFKPLYKQVLSDRESLSFYGEGYTSDEEVLEVERNTL
NKNSEIFSSIKKLEKLFKNFDEYSSAGIFVKNGPAISTISKDIFGEWNVIRDKWNAEYDDIHLKKKAVVTEKYEDDR
RKSFKKIGSFSLEQLQEYADADLSVVEKLKEIIIQKVDEIYKVYGSSEKLFDADFVLEKSLKKNDAVVAIMKDLLDS
VKSFENYIKAFFGEGKETNRDESFYGDFVLAYDILLKVDHIYDAIRNYVTQKPYSKDKFKLYFQNPQFMGGWDKDKE
TDYRATILRYGSKYYLAIMDKKYAKCLQKIDKDDVNGNYEKINYKLLPGPNKMLPKVFFSKKWMAYYNPSEDIQKIY
KNGTFKKGDMFNLNDCHKLIDFFKDSISRYPKWSNAYDENFSETEKYKDIAGFYREVEEQGYKVSFESASKKEVDKL
VEEGKLYMFQIYNKDFSDKSHGTPNLHTMYFKLLFDENNHGQIRLSGGAELFMRRASLKKEELVVHPANSPIANKNP
DNPKKITTLSYDVYKDKRESEDQYELHIPIAINKCPKNIFKINTEVRVLLKHDDNPYVIGIDRGERNLLYIVVVDGK
GNIVEQYSLNEIINNFNGIRIKTDYHSLLDKKEKERFEARQNWTSIENIKELKAGYISQVVHKICELVEKYDAVIAL
EDLNSGFKNSRVKVEKQVYQKFEKMLIDKLNYMVDKKSNPCATGGALKGYQITNKFESFKSMSTQNGFIFYIPAWLT
SKIDPSTGFVNLLKTKYTSIADSKKFISSFDRIMYVPEEDLFEFALDYKNFSRTDADYIKKWKLYSYGNRIRIFRNP
KKNNVEDWEEVCLTSAYKELENKYGINYQQGDIRALLCEQSDKAFYSSFMALMSLMLQMRNSITGRTDVDFLISPVK
NSDGIFYDSRNYEAQENAILPKNADANGAYNIARKVLWAIGQFKKAEDEKLDKVKIAISNKEWLEYAQTSVKH
XPXPXPMVSKGEEDNMAIIKEFMRFKVHMEGSVNGHEFEIEGEGEGRPYEGTQTAKLKVTKGGPLPFAWDILSPQF
MYGSKAYVKHPADIPDYLKLSFPEGFKWERVMNFEDGGVVTVTQDSSLQDGEFIYKVKLRGTNFPSDGPVMQKKTM
GWEASSERMYPEDGALKGEIKQRLKLKDGGHYDAEVKTTYKAKKPVQLPGAYNVNIKLDITSHNEDYTIVEQYERA
EGRHSTGGMDELYK
SEQ ID NO: 230
MSKLEKFTNCYSLSKTLRFKAIPVGKTQENIDNKRLLVEDEKRAEDYKGVKKLLDRYYLSFINDVLHSIKLKNLNNY
ISLFRKKTRTEKENKELENLEINLRKEIAKAFKGNEGYKSLFKKDIIETILPEFLDDKDEIALVNSENGETTAFTGE
FDNRENMESEEAKSTSIAFRCINENLTRYISNMDIFEKVDAIFDKHEVQEIKEKILNSDYDVEDFFEGEFFNEVLIQ
EGIDVYNAIIGGFVTESGEKIKGLNEYINLYNQKTKQKLPKFKPLYKQVLSDRESLSFYGEGYTSDEEVLEVERNTL
NKNSEIFSSIKKLEKLFKNFDEYSSAGIFVKNGPAISTISKDIFGEWNVIRDKWNAEYDDIHLKKKAVVTEKYEDDR
RKSFKKIGSFSLEQLQEYADADLSVVEKLKEIIIQKVDEIYKVYGSSEKLFDADFVLEKSLKKNDAVVAIMKDLLDS
VKSFENYIKAFFGEGKETNRDESFYGDFVLAYDILLKVDHIYDAIRNYVTQKPYSKDKFKLYFQNPQFMGGWDKDKE
TDYRATILRYGSKYYLAIMDKKYAKCLQKIDKDDVNGNYEKINYKLLPGPNKMLPKVFFSKKWMAYYNPSEDIQKIY
KNGTFKKGDMFNLNDCHKLIDFFKDSISRYPKWSNAYDENFSETEKYKDIAGFYREVEEQGYKVSFESASKKEVDKL
VEEGKLYMFQIYNKDFSDKSHGTPNLHTMYFKLLFDENNHGQIRLSGGAELFMRRASLKKEELVVHPANSPIANKNP
DNPKKITTLSYDVYKDKRESEDQYELHIPIAINKCPKNIFKINTEVRVLLKHDDNPYVIGIDRGERNLLYIVVVDGK
GNIVEQYSLNEIINNFNGIRIKTDYHSLLDKKEKERFEARQNWTSIENIKELKAGYISQVVHKICELVEKYDAVIAL
EDLNSGFKNSRVKVEKQVYQKFEKMLIDKLNYMVDKKSNPCATGGALKGYQITNKFESFKSMSTQNGFIFYIPAWLT
SKIDPSTGFVNLLKTKYTSIADSKKFISSFDRIMYVPEEDLFEFALDYKNFSRTDADYIKKWKLYSYGNRIRIFRNP
KKNNVEDWEEVCLTSAYKELENKYGINYQQGDIRALLCEQSDKAFYSSFMALMSLMLQMRNSITGRTDVDFLISPVK
NSDGIFYDSRNYEAQENAILPKNADANGAYNIARKVLWAIGQFKKAEDEKLDKVKIAISNKEWLEYAQTSVKH
XPXPXPXPMVSKGEEDNMAIIKEFMRFKVHMEGSVNGHEFEIEGEGEGRPYEGTQTAKLKVTKGGPLPFAWDILSP
QFMYGSKAYVKHPADIPDYLKLSFPEGFKWERVMNFEDGGVVTVTQDSSLQDGEFIYKVKLRGTNFPSDGPVMQKK
TMGWEASSERMYPEDGALKGEIKQRLKLKDGGHYDAEVKTTYKAKKPVQLPGAYNVNIKLDITSHNEDYTIVEQYE
RAEGRHSTGGMDELYK
SEQ ID NO: 231
MSKLEKFTNCYSLSKTLRFKAIPVGKTQENIDNKRLLVEDEKRAEDYKGVKKLLDRYYLSFINDVLHSIKLKNLNNY
ISLFRKKTRTEKENKELENLEINLRKEIAKAFKGNEGYKSLFKKDIIETILPEFLDDKDEIALVNSENGETTAFTGE
FDNRENMESEEAKSTSIAFRCINENLTRYISNMDIFEKVDAIFDKHEVQEIKEKILNSDYDVEDFFEGEFFNEVLIQ
EGIDVYNAIIGGFVTESGEKIKGLNEYINLYNQKTKQKLPKFKPLYKQVLSDRESLSFYGEGYTSDEEVLEVERNTL
NKNSEIFSSIKKLEKLFKNFDEYSSAGIFVKNGPAISTISKDIFGEWNVIRDKWNAEYDDIHLKKKAVVTEKYEDDR
RKSFKKIGSFSLEQLQEYADADLSVVEKLKEIIIQKVDEIYKVYGSSEKLFDADFVLEKSLKKNDAVVAIMKDLLDS
VKSFENYIKAFFGEGKETNRDESFYGDFVLAYDILLKVDHIYDAIRNYVTQKPYSKDKFKLYFQNPQFMGGWDKDKE
TDYRATILRYGSKYYLAIMDKKYAKCLQKIDKDDVNGNYEKINYKLLPGPNKMLPKVFFSKKWMAYYNPSEDIQKIY
KNGTFKKGDMFNLNDCHKLIDFFKDSISRYPKWSNAYDENFSETEKYKDIAGFYREVEEQGYKVSFESASKKEVDKL
VEEGKLYMFQIYNKDFSDKSHGTPNLHTMYFKLLFDENNHGQIRLSGGAELFMRRASLKKEELVVHPANSPIANKNP
DNPKKITTLSYDVYKDKRESEDQYELHIPIAINKCPKNIFKINTEVRVLLKHDDNPYVIGIDRGERNLLYIVVVDGK
GNIVEQYSLNEIINNFNGIRIKTDYHSLLDKKEKERFEARQNWTSIENIKELKAGYISQVVHKICELVEKYDAVIAL
EDLNSGFKNSRVKVEKQVYQKFEKMLIDKLNYMVDKKSNPCATGGALKGYQITNKFESFKSMSTQNGFIFYIPAWLT
SKIDPSTGFVNLLKTKYTSIADSKKFISSFDRIMYVPEEDLFEFALDYKNFSRTDADYIKKWKLYSYGNRIRIFRNP
KKNNVEDWEEVCLTSAYKELENKYGINYQQGDIRALLCEQSDKAFYSSFMALMSLMLQMRNSITGRTDVDFLISPVK
NSDGIFYDSRNYEAQENAILPKNADANGAYNIARKVLWAIGQFKKAEDEKLDKVKIAISNKEWLEYAQTSVKH
XPXPXPXPXPMVSKGEEDNMAIIKEFMRFKVHMEGSVNGHEFEIEGEGEGRPYEGTQTAKLKVTKGGPLPFAWDIL
SPQFMYGSKAYVKHPADIPDYLKLSFPEGFKWERVMNFEDGGVVTVTQDSSLQDGEFIYKVKLRGTNFPSDGPVMQ
KKTMGWEASSERMYPEDGALKGEIKQRLKLKDGGHYDAEVKTTYKAKKPVQLPGAYNVNIKLDITSHNEDYTIVEQ
YERAEGRHSTGGMDELYK
SEQ ID NO: 232
MSKLEKFTNCYSLSKTLRFKAIPVGKTQENIDNKRLLVEDEKRAEDYKGVKKLLDRYYLSFINDVLHSIKLKNLNNY
ISLFRKKTRTEKENKELENLEINLRKEIAKAFKGNEGYKSLFKKDIIETILPEFLDDKDEIALVNSENGETTAFTGE
FDNRENMESEEAKSTSIAFRCINENLTRYISNMDIFEKVDAIFDKHEVQEIKEKILNSDYDVEDFFEGEFFNEVLIQ
EGIDVYNAIIGGFVTESGEKIKGLNEYINLYNQKTKQKLPKFKPLYKQVLSDRESLSFYGEGYTSDEEVLEVERNTL
NKNSEIFSSIKKLEKLFKNFDEYSSAGIFVKNGPAISTISKDIFGEWNVIRDKWNAEYDDIHLKKKAVVTEKYEDDR
RKSFKKIGSFSLEQLQEYADADLSVVEKLKEIIIQKVDEIYKVYGSSEKLFDADFVLEKSLKKNDAVVAIMKDLLDS
VKSFENYIKAFFGEGKETNRDESFYGDFVLAYDILLKVDHIYDAIRNYVTQKPYSKDKFKLYFQNPQFMGGWDKDKE
TDYRATILRYGSKYYLAIMDKKYAKCLQKIDKDDVNGNYEKINYKLLPGPNKMLPKVFFSKKWMAYYNPSEDIQKIY
KNGTFKKGDMFNLNDCHKLIDFFKDSISRYPKWSNAYDENFSETEKYKDIAGFYREVEEQGYKVSFESASKKEVDKL
VEEGKLYMFQIYNKDFSDKSHGTPNLHTMYFKLLFDENNHGQIRLSGGAELFMRRASLKKEELVVHPANSPIANKNP
DNPKKITTLSYDVYKDKRESEDQYELHIPIAINKCPKNIFKINTEVRVLLKHDDNPYVIGIDRGERNLLYIVVVDGK
GNIVEQYSLNEIINNFNGIRIKTDYHSLLDKKEKERFEARQNWTSIENIKELKAGYISQVVHKICELVEKYDAVIAL
EDLNSGFKNSRVKVEKQVYQKFEKMLIDKLNYMVDKKSNPCATGGALKGYQITNKFESFKSMSTQNGFIFYIPAWLT
SKIDPSTGFVNLLKTKYTSIADSKKFISSFDRIMYVPEEDLFEFALDYKNFSRTDADYIKKWKLYSYGNRIRIFRNP
KKNNVEDWEEVCLTSAYKELENKYGINYQQGDIRALLCEQSDKAFYSSFMALMSLMLQMRNSITGRTDVDFLISPVK
NSDGIFYDSRNYEAQENAILPKNADANGAYNIARKVLWAIGQFKKAEDEKLDKVKIAISNKEWLEYAQTSVKH
XPXPXPXPXPXPMVSKGEEDNMAIIKEFMRFKVHMEGSVNGHEFEIEGEGEGRPYEGTQTAKLKVTKGGPLPFAWD
ILSPQFMYGSKAYVKHPADIPDYLKLSFPEGFKWERVMNFEDGGVVTVTQDSSLQDGEFIYKVKLRGTNFPSDGPV
MQKKTMGWEASSERMYPEDGALKGEIKQRLKLKDGGHYDAEVKTTYKAKKPVQLPGAYNVNIKLDITSHNEDYTIV
EQYERAEGRHSTGGMDELYK
SEQ ID NO: 233
MSKLEKFTNCYSLSKTLRFKAIPVGKTQENIDNKRLLVEDEKRAEDYKGVKKLLDRYYLSFINDVLHSIKLKNLNNY
ISLFRKKTRTEKENKELENLEINLRKEIAKAFKGNEGYKSLFKKDIIETILPEFLDDKDEIALVNSENGETTAFTGE
FDNRENMESEEAKSTSIAFRCINENLTRYISNMDIFEKVDAIFDKHEVQEIKEKILNSDYDVEDFFEGEFFNEVLIQ
EGIDVYNAIIGGFVTESGEKIKGLNEYINLYNQKTKQKLPKFKPLYKQVLSDRESLSFYGEGYTSDEEVLEVERNTL
NKNSEIFSSIKKLEKLFKNFDEYSSAGIFVKNGPAISTISKDIFGEWNVIRDKWNAEYDDIHLKKKAVVTEKYEDDR
RKSFKKIGSFSLEQLQEYADADLSVVEKLKEIIIQKVDEIYKVYGSSEKLFDADFVLEKSLKKNDAVVAIMKDLLDS
VKSFENYIKAFFGEGKETNRDESFYGDFVLAYDILLKVDHIYDAIRNYVTQKPYSKDKFKLYFQNPQFMGGWDKDKE
TDYRATILRYGSKYYLAIMDKKYAKCLQKIDKDDVNGNYEKINYKLLPGPNKMLPKVFFSKKWMAYYNPSEDIQKIY
KNGTFKKGDMFNLNDCHKLIDFFKDSISRYPKWSNAYDENFSETEKYKDIAGFYREVEEQGYKVSFESASKKEVDKL
VEEGKLYMFQIYNKDFSDKSHGTPNLHTMYFKLLFDENNHGQIRLSGGAELFMRRASLKKEELVVHPANSPIANKNP
DNPKKITTLSYDVYKDKRESEDQYELHIPIAINKCPKNIFKINTEVRVLLKHDDNPYVIGIDRGERNLLYIVVVDGK
GNIVEQYSLNEIINNFNGIRIKTDYHSLLDKKEKERFEARQNWTSIENIKELKAGYISQVVHKICELVEKYDAVIAL
EDLNSGFKNSRVKVEKQVYQKFEKMLIDKLNYMVDKKSNPCATGGALKGYQITNKFESFKSMSTQNGFIFYIPAWLT
SKIDPSTGFVNLLKTKYTSIADSKKFISSFDRIMYVPEEDLFEFALDYKNFSRTDADYIKKWKLYSYGNRIRIFRNP
KKNNVEDWEEVCLTSAYKELENKYGINYQQGDIRALLCEQSDKAFYSSFMALMSLMLQMRNSITGRTDVDFLISPVK
NSDGIFYDSRNYEAQENAILPKNADANGAYNIARKVLWAIGQFKKAEDEKLDKVKIAISNKEWLEYAQTSVKH
XPXPXPXPXPXPXPMVSKGEEDNMAIIKEFMRFKVHMEGSVNGHEFEIEGEGEGRPYEGTQTAKLKVTKGGPLPFA
WDILSPQFMYGSKAYVKHPADIPDYLKLSFPEGFKWERVMNFEDGGVVTVTQDSSLQDGEFIYKVKLRGTNFPSDG
PVMQKKTMGWEASSERMYPEDGALKGEIKQRLKLKDGGHYDAEVKTTYKAKKPVQLPGAYNVNIKLDITSHNEDYT
IVEQYERAEGRHSTGGMDELYK
SEQ ID NO: 234
MSKLEKFTNCYSLSKTLRFKAIPVGKTQENIDNKRLLVEDEKRAEDYKGVKKLLDRYYLSFINDVLHSIKLKNLNNY
ISLFRKKTRTEKENKELENLEINLRKEIAKAFKGNEGYKSLFKKDIIETILPEFLDDKDEIALVNSENGETTAFTGE
FDNRENMESEEAKSTSIAFRCINENLTRYISNMDIFEKVDAIFDKHEVQEIKEKILNSDYDVEDFFEGEFFNEVLIQ
EGIDVYNAIIGGFVTESGEKIKGLNEYINLYNQKTKQKLPKFKPLYKQVLSDRESLSFYGEGYTSDEEVLEVERNTL
NKNSEIFSSIKKLEKLFKNFDEYSSAGIFVKNGPAISTISKDIFGEWNVIRDKWNAEYDDIHLKKKAVVTEKYEDDR
RKSFKKIGSFSLEQLQEYADADLSVVEKLKEIIIQKVDEIYKVYGSSEKLFDADFVLEKSLKKNDAVVAIMKDLLDS
VKSFENYIKAFFGEGKETNRDESFYGDFVLAYDILLKVDHIYDAIRNYVTQKPYSKDKFKLYFQNPQFMGGWDKDKE
TDYRATILRYGSKYYLAIMDKKYAKCLQKIDKDDVNGNYEKINYKLLPGPNKMLPKVFFSKKWMAYYNPSEDIQKIY
KNGTFKKGDMFNLNDCHKLIDFFKDSISRYPKWSNAYDENFSETEKYKDIAGFYREVEEQGYKVSFESASKKEVDKL
VEEGKLYMFQIYNKDFSDKSHGTPNLHTMYFKLLFDENNHGQIRLSGGAELFMRRASLKKEELVVHPANSPIANKNP
DNPKKITTLSYDVYKDKRESEDQYELHIPIAINKCPKNIFKINTEVRVLLKHDDNPYVIGIDRGERNLLYIVVVDGK
GNIVEQYSLNEIINNFNGIRIKTDYHSLLDKKEKERFEARQNWTSIENIKELKAGYISQVVHKICELVEKYDAVIAL
EDLNSGFKNSRVKVEKQVYQKFEKMLIDKLNYMVDKKSNPCATGGALKGYQITNKFESFKSMSTQNGFIFYIPAWLT
SKIDPSTGFVNLLKTKYTSIADSKKFISSFDRIMYVPEEDLFEFALDYKNFSRTDADYIKKWKLYSYGNRIRIFRNP
KKNNVEDWEEVCLTSAYKELENKYGINYQQGDIRALLCEQSDKAFYSSFMALMSLMLQMRNSITGRTDVDFLISPVK
NSDGIFYDSRNYEAQENAILPKNADANGAYNIARKVLWAIGQFKKAEDEKLDKVKIAISNKEWLEYAQTSVKH
XPXPXPXPXPXPXPXPMVSKGEEDNMAIIKEFMRFKVHMEGSVNGHEFEIEGEGEGRPYEGTQTAKLKVTKGGPLP
FAWDILSPQFMYGSKAYVKHPADIPDYLKLSFPEGFKWERVMNFEDGGVVTVTQDSSLQDGEFIYKVKLRGTNFPS
DGPVMQKKTMGWEASSERMYPEDGALKGEIKQRLKLKDGGHYDAEVKTTYKAKKPVQLPGAYNVNIKLDITSHNED
YTIVEQYERAEGRHSTGGMDELYK
SEQ ID NO: 235
MSKLEKFTNCYSLSKTLRFKAIPVGKTQENIDNKRLLVEDEKRAEDYKGVKKLLDRYYLSFINDVLHSIKLKNLNNY
ISLFRKKTRTEKENKELENLEINLRKEIAKAFKGNEGYKSLFKKDIIETILPEFLDDKDEIALVNSENGETTAFTGE
FDNRENMESEEAKSTSIAFRCINENLTRYISNMDIFEKVDAIFDKHEVQEIKEKILNSDYDVEDFFEGEFFNEVLIQ
EGIDVYNAIIGGFVTESGEKIKGLNEYINLYNQKTKQKLPKFKPLYKQVLSDRESLSFYGEGYTSDEEVLEVERNTL
NKNSEIFSSIKKLEKLFKNFDEYSSAGIFVKNGPAISTISKDIFGEWNVIRDKWNAEYDDIHLKKKAVVTEKYEDDR
RKSFKKIGSFSLEQLQEYADADLSVVEKLKEIIIQKVDEIYKVYGSSEKLFDADFVLEKSLKKNDAVVAIMKDLLDS
VKSFENYIKAFFGEGKETNRDESFYGDFVLAYDILLKVDHIYDAIRNYVTQKPYSKDKFKLYFQNPQFMGGWDKDKE
TDYRATILRYGSKYYLAIMDKKYAKCLQKIDKDDVNGNYEKINYKLLPGPNKMLPKVFFSKKWMAYYNPSEDIQKIY
KNGTFKKGDMFNLNDCHKLIDFFKDSISRYPKWSNAYDENFSETEKYKDIAGFYREVEEQGYKVSFESASKKEVDKL
VEEGKLYMFQIYNKDFSDKSHGTPNLHTMYFKLLFDENNHGQIRLSGGAELFMRRASLKKEELVVHPANSPIANKNP
DNPKKITTLSYDVYKDKRESEDQYELHIPIAINKCPKNIFKINTEVRVLLKHDDNPYVIGIDRGERNLLYIVVVDGK
GNIVEQYSLNEIINNFNGIRIKTDYHSLLDKKEKERFEARQNWTSIENIKELKAGYISQVVHKICELVEKYDAVIAL
EDLNSGFKNSRVKVEKQVYQKFEKMLIDKLNYMVDKKSNPCATGGALKGYQITNKFESFKSMSTQNGFIFYIPAWLT
SKIDPSTGFVNLLKTKYTSIADSKKFISSFDRIMYVPEEDLFEFALDYKNFSRTDADYIKKWKLYSYGNRIRIFRNP
KKNNVEDWEEVCLTSAYKELENKYGINYQQGDIRALLCEQSDKAFYSSFMALMSLMLQMRNSITGRTDVDFLISPVK
NSDGIFYDSRNYEAQENAILPKNADANGAYNIARKVLWAIGQFKKAEDEKLDKVKIAISNKEWLEYAQTSVKH
XPXPXPXPXPXPXPXPXPMVSKGEEDNMAIIKEFMRFKVHMEGSVNGHEFEIEGEGEGRPYEGTQTAKLKVTKGGP
LPFAWDILSPQFMYGSKAYVKHPADIPDYLKLSFPEGFKWERVMNFEDGGVVTVTQDSSLQDGEFIYKVKLRGTNF
PSDGPVMQKKTMGWEASSERMYPEDGALKGEIKQRLKLKDGGHYDAEVKTTYKAKKPVQLPGAYNVNIKLDITSHN
EDYTIVEQYERAEGRHSTGGMDELYK
SEQ ID NO: 236
MSKLEKFTNCYSLSKTLRFKAIPVGKTQENIDNKRLLVEDEKRAEDYKGVKKLLDRYYLSFINDVLHSIKLKNLNNY
ISLFRKKTRTEKENKELENLEINLRKEIAKAFKGNEGYKSLFKKDIIETILPEFLDDKDEIALVNSENGETTAFTGE
FDNRENMESEEAKSTSIAFRCINENLTRYISNMDIFEKVDAIFDKHEVQEIKEKILNSDYDVEDFFEGEFFNEVLIQ
EGIDVYNAIIGGFVTESGEKIKGLNEYINLYNQKTKQKLPKFKPLYKQVLSDRESLSFYGEGYTSDEEVLEVERNTL
NKNSEIFSSIKKLEKLFKNFDEYSSAGIFVKNGPAISTISKDIFGEWNVIRDKWNAEYDDIHLKKKAVVTEKYEDDR
RKSFKKIGSFSLEQLQEYADADLSVVEKLKEIIIQKVDEIYKVYGSSEKLFDADFVLEKSLKKNDAVVAIMKDLLDS
VKSFENYIKAFFGEGKETNRDESFYGDFVLAYDILLKVDHIYDAIRNYVTQKPYSKDKFKLYFQNPQFMGGWDKDKE
TDYRATILRYGSKYYLAIMDKKYAKCLQKIDKDDVNGNYEKINYKLLPGPNKMLPKVFFSKKWMAYYNPSEDIQKIY
KNGTFKKGDMFNLNDCHKLIDFFKDSISRYPKWSNAYDENFSETEKYKDIAGFYREVEEQGYKVSFESASKKEVDKL
VEEGKLYMFQIYNKDFSDKSHGTPNLHTMYFKLLFDENNHGQIRLSGGAELFMRRASLKKEELVVHPANSPIANKNP
DNPKKITTLSYDVYKDKRESEDQYELHIPIAINKCPKNIFKINTEVRVLLKHDDNPYVIGIDRGERNLLYIVVVDGK
GNIVEQYSLNEIINNFNGIRIKTDYHSLLDKKEKERFEARQNWTSIENIKELKAGYISQVVHKICELVEKYDAVIAL
EDLNSGFKNSRVKVEKQVYQKFEKMLIDKLNYMVDKKSNPCATGGALKGYQITNKFESFKSMSTQNGFIFYIPAWLT
SKIDPSTGFVNLLKTKYTSIADSKKFISSFDRIMYVPEEDLFEFALDYKNFSRTDADYIKKWKLYSYGNRIRIFRNP
KKNNVEDWEEVCLTSAYKELENKYGINYQQGDIRALLCEQSDKAFYSSFMALMSLMLQMRNSITGRTDVDFLISPVK
NSDGIFYDSRNYEAQENAILPKNADANGAYNIARKVLWAIGQFKKAEDEKLDKVKIAISNKEWLEYAQTSVKH
XPXPXPXPXPXPXPXPXPXPMVSKGEEDNMAIIKEFMRFKVHMEGSVNGHEFEIEGEGEGRPYEGTQTAKLKVTKG
GPLPFAWDILSPQFMYGSKAYVKHPADIPDYLKLSFPEGFKWERVMNFEDGGVVTVTQDSSLQDGEFIYKVKLRGT
NFPSDGPVMQKKTMGWEASSERMYPEDGALKGEIKQRLKLKDGGHYDAEVKTTYKAKKPVQLPGAYNVNIKLDITS
HNEDYTIVEQYERAEGRHSTGGMDELYK
SEQ ID NO: 237
MSKLEKFTNCYSLSKTLRFKAIPVGKTQENIDNKRLLVEDEKRAEDYKGVKKLLDRYYLSFINDVLHSIKLKNLNNY
ISLFRKKTRTEKENKELENLEINLRKEIAKAFKGNEGYKSLFKKDIIETILPEFLDDKDEIALVNSENGETTAFTGE
FDNRENMESEEAKSTSIAFRCINENLTRYISNMDIFEKVDAIFDKHEVQEIKEKILNSDYDVEDFFEGEFFNEVLIQ
EGIDVYNAIIGGFVTESGEKIKGLNEYINLYNQKTKQKLPKFKPLYKQVLSDRESLSFYGEGYTSDEEVLEVERNTL
NKNSEIFSSIKKLEKLFKNFDEYSSAGIFVKNGPAISTISKDIFGEWNVIRDKWNAEYDDIHLKKKAVVTEKYEDDR
RKSFKKIGSFSLEQLQEYADADLSVVEKLKEIIIQKVDEIYKVYGSSEKLFDADFVLEKSLKKNDAVVAIMKDLLDS
VKSFENYIKAFFGEGKETNRDESFYGDFVLAYDILLKVDHIYDAIRNYVTQKPYSKDKFKLYFQNPQFMGGWDKDKE
TDYRATILRYGSKYYLAIMDKKYAKCLQKIDKDDVNGNYEKINYKLLPGPNKMLPKVFFSKKWMAYYNPSEDIQKIY
KNGTFKKGDMFNLNDCHKLIDFFKDSISRYPKWSNAYDENFSETEKYKDIAGFYREVEEQGYKVSFESASKKEVDKL
VEEGKLYMFQIYNKDFSDKSHGTPNLHTMYFKLLFDENNHGQIRLSGGAELFMRRASLKKEELVVHPANSPIANKNP
DNPKKITTLSYDVYKDKRESEDQYELHIPIAINKCPKNIFKINTEVRVLLKHDDNPYVIGIDRGERNLLYIVVVDGK
GNIVEQYSLNEIINNFNGIRIKTDYHSLLDKKEKERFEARQNWTSIENIKELKAGYISQVVHKICELVEKYDAVIAL
EDLNSGFKNSRVKVEKQVYQKFEKMLIDKLNYMVDKKSNPCATGGALKGYQITNKFESFKSMSTQNGFIFYIPAWLT
SKIDPSTGFVNLLKTKYTSIADSKKFISSFDRIMYVPEEDLFEFALDYKNFSRTDADYIKKWKLYSYGNRIRIFRNP
KKNNVEDWEEVCLTSAYKELENKYGINYQQGDIRALLCEQSDKAFYSSFMALMSLMLQMRNSITGRTDVDFLISPVK
NSDGIFYDSRNYEAQENAILPKNADANGAYNIARKVLWAIGQFKKAEDEKLDKVKIAISNKEWLEYAQTSVKH
XPXPXPXPXPXPXPXPXPXPXPMVSKGEEDNMAIIKEFMRFKVHMEGSVNGHEFEIEGEGEGRPYEGTQTAKLKVT
KGGPLPFAWDILSPQFMYGSKAYVKHPADIPDYLKLSFPEGFKWERVMNFEDGGVVTVTQDSSLQDGEFIYKVKLR
GTNFPSDGPVMQKKTMGWEASSERMYPEDGALKGEIKQRLKLKDGGHYDAEVKTTYKAKKPVQLPGAYNVNIKLDI
TSHNEDYTIVEQYERAEGRHSTGGMDELYK
SEQ ID NO: 238
MSKLEKFTNCYSLSKTLRFKAIPVGKTQENIDNKRLLVEDEKRAEDYKGVKKLLDRYYLSFINDVLHSIKLKNLNNY
ISLFRKKTRTEKENKELENLEINLRKEIAKAFKGNEGYKSLFKKDIIETILPEFLDDKDEIALVNSENGETTAFTGE
FDNRENMESEEAKSTSIAFRCINENLTRYISNMDIFEKVDAIFDKHEVQEIKEKILNSDYDVEDFFEGEFFNEVLIQ
EGIDVYNAIIGGFVTESGEKIKGLNEYINLYNQKTKQKLPKFKPLYKQVLSDRESLSFYGEGYTSDEEVLEVERNTL
NKNSEIFSSIKKLEKLFKNFDEYSSAGIFVKNGPAISTISKDIFGEWNVIRDKWNAEYDDIHLKKKAVVTEKYEDDR
RKSFKKIGSFSLEQLQEYADADLSVVEKLKEIIIQKVDEIYKVYGSSEKLFDADFVLEKSLKKNDAVVAIMKDLLDS
VKSFENYIKAFFGEGKETNRDESFYGDFVLAYDILLKVDHIYDAIRNYVTQKPYSKDKFKLYFQNPQFMGGWDKDKE
TDYRATILRYGSKYYLAIMDKKYAKCLQKIDKDDVNGNYEKINYKLLPGPNKMLPKVFFSKKWMAYYNPSEDIQKIY
KNGTFKKGDMFNLNDCHKLIDFFKDSISRYPKWSNAYDFNFSETEKYKDIAGFYREVEEQGYKVSFESASKKEVDKL
VEEGKLYMFQIYNKDFSDKSHGTPNLHTMYFKLLFDENNHGQIRLSGGAELFMRRASLKKEELVVHPANSPIANKNP
DNPKKITTLSYDVYKDKRFSEDQYELHIPIAINKCPKNIFKINTEVRVLLKHDDNPYVIGIDRGERNLLYIVVVDGK
GNIVEQYSLNEIINNFNGIRIKTDYHSLLDKKEKERFEARQNWTSIENIKELKAGYISQVVHKICELVEKYDAVIAL
EDLNSGFKNSRVKVEKQVYQKFEKMLIDKLNYMVDKKSNPCATGGALKGYQITNKFESFKSMSTQNGFIFYIPAWLT
SKIDPSTGFVNLLKTKYTSIADSKKFISSFDRIMYVPEEDLFEFALDYKNFSRTDADYIKKWKLYSYGNRIRIFRNP
KKNNVFDWEEVCLTSAYKELFNKYGINYQQGDIRALLCEQSDKAFYSSFMALMSLMLQMRNSITGRTDVDFLISPVK
NSDGIFYDSRNYEAQENAILPKNADANGAYNIARKVLWAIGQFKKAEDEKLDKVKIAISNKEWLEYAQTSVKH
XPXPXPXPXPXPXPXPXPXPXPXPMVSKGEEDNMAIIKEFMRFKVHMEGSVNGHEFEIEGEGEGRPYEGTQTAKLK
VTKGGPLPFAWDILSPQFMYGSKAYVKHPADIPDYLKLSFPEGFKWERVMNFEDGGVVTVTQDSSLQDGEFIYKVK
LRGTNFPSDGPVMQKKTMGWEASSERMYPEDGALKGEIKQRLKLKDGGHYDAEVKTTYKAKKPVQLPGAYNVNIKL
DITSHNEDYTIVEQYERAEGRHSTGGMDELYK
SEQ ID NO: 239
MSKLEKFTNCYSLSKTLRFKAIPVGKTQENIDNKRLLVEDEKRAEDYKGVKKLLDRYYLSFINDVLHSIKLKNLNNY
ISLERKKIRTEKENKELENLEINLRKEIAKAFKGNEGYKSLFKKDIIETILPEFLDDKDEIALVNSENGETTAFTGF
FDNRENMFSEEAKSTSIAFRCINENLTRYISNMDIFEKVDAIFDKHEVQEIKEKILNSDYDVEDFFEGEFFNFVLIQ
EGIDVYNAIIGGFVTESGEKIKGLNEYINLYNQKTKQKLPKFKPLYKQVLSDRESLSFYGEGYISDEEVLEVERNIL
NKNSEIFSSIKKLEKLFKNFDEYSSAGIFVKNGPAISTISKDIFGEWNVIRDKWNAEYDDIHLKKKAVVTEKYEDDR
RKSFKKIGSFSLEQLQEYADADLSVVEKLKEIIIQKVDEIYKVYGSSEKLFDADFVLEKSLKKNDAVVAIMKDLLDS
VKSFENYIKAFFGEGKETNRDESFYGDFVLAYDILLKVDHIYDAIRNYVTQKPYSKDKFKLYFQNPQFMGGWDKDKE
TDYRATILRYGSKYYLAIMDKKYAKCLQKIDKDDVNGNYEKINYKLLPGPNKMLPKVFFSKKWMAYYNPSEDIQKIY
KNGTFKKGDMFNLNDCHKLIDFFKDSISRYPKWSNAYDFNFSETEKYKDIAGFYREVEEQGYKVSFESASKKEVDKL
VEEGKLYMFQIYNKDFSDKSHGTPNLHTMYFKLLFDENNHGQIRLSGGAELFMRRASLKKEELVVHPANSPIANKNP
DNPKKITTLSYDVYKDKRFSEDQYELHIPIAINKCPKNIFKINTEVRVLLKHDDNPYVIGIDRGERNLLYIVVVDGK
GNIVEQYSLNEIINNFNGIRIKTDYHSLLDKKEKERFEARQNWTSIENIKELKAGYISQVVHKICELVEKYDAVIAL
EDLNSGFKNSRVKVEKQVYQKFEKMLIDKLNYMVDKKSNPCATGGALKGYQITNKFESFKSMSTQNGFIFYIPAWLT
SKIDPSTGFVNLLKTKYTSIADSKKFISSFDRIMYVPEEDLFEFALDYKNFSRTDADYIKKWKLYSYGNRIRIFRNP
KKNNVFDWEEVCLTSAYKELFNKYGINYQQGDIRALLCEQSDKAFYSSFMALMSLMLQMRNSITGRTDVDFLISPVK
NSDGIFYDSRNYEAQENAILPKNADANGAYNIARKVLWAIGQFKKAEDEKLDKVKIAISNKEWLEYAQTSVKH
XPXPXPXPXPXPXPXPXPXPXPXPXPMVSKGEEDNMAIIKEFMRFKVHMEGSVNGHEFEIEGEGEGRPYEGTQTAK
LKVTKGGPLPFAWDILSPQFMYGSKAYVKHPADIPDYLKLSFPEGFKWERVMNFEDGGVVTVTQDSSLQDGEFIYK
VKLRGTNFPSDGPVMQKKTMGWEASSERMYPEDGALKGEIKQRLKLKDGGHYDAEVKTTYKAKKPVQLPGAYNVNI
KLDITSHNEDYTIVEQYERAEGRHSTGGMDELYK
SEQ ID NO: 240
MSKLEKFTNCYSLSKTLRFKAIPVGKTQENIDNKRLLVEDEKRAEDYKGVKKLLDRYYLSFINDVLHSIKLKNLNNY
ISLERKKIRTEKENKELENLEINLRKEIAKAFKGNEGYKSLFKKDIIETILPEFLDDKDEIALVNSENGETTAFTGF
FDNRENMFSEEAKSTSIAFRCINENLTRYISNMDIFEKVDAIFDKHEVQEIKEKILNSDYDVEDFFEGEFFNFVLIQ
EGIDVYNAIIGGFVTESGEKIKGLNEYINLYNQKTKQKLPKFKPLYKQVLSDRESLSFYGEGYISDEEVLEVERNIL
NKNSEIFSSIKKLEKLFKNFDEYSSAGIFVKNGPAISTISKDIFGEWNVIRDKWNAEYDDIHLKKKAVVTEKYEDDR
RKSFKKIGSFSLEQLQEYADADLSVVEKLKEIIIQKVDEIYKVYGSSEKLFDADFVLEKSLKKNDAVVAIMKDLLDS
VKSFENYIKAFFGEGKETNRDESFYGDFVLAYDILLKVDHIYDAIRNYVTQKPYSKDKFKLYFQNPQFMGGWDKDKE
TDYRATILRYGSKYYLAIMDKKYAKCLQKIDKDDVNGNYEKINYKLLPGPNKMLPKVFFSKKWMAYYNPSEDIQKIY
KNGTFKKGDMFNLNDCHKLIDFFKDSISRYPKWSNAYDFNFSETEKYKDIAGFYREVEEQGYKVSFESASKKEVDKL
VEEGKLYMFQIYNKDFSDKSHGTPNLHTMYFKLLFDENNHGQIRLSGGAELFMRRASLKKEELVVHPANSPIANKNP
DNPKKITTLSYDVYKDKRFSEDQYELHIPIAINKCPKNIFKINTEVRVLLKHDDNPYVIGIDRGERNLLYIVVVDGK
GNIVEQYSLNEIINNFNGIRIKTDYHSLLDKKEKERFEARQNWTSIENIKELKAGYISQVVHKICELVEKYDAVIAL
EDLNSGFKNSRVKVEKQVYQKFEKMLIDKLNYMVDKKSNPCATGGALKGYQITNKFESFKSMSTQNGFIFYIPAWLT
SKIDPSTGFVNLLKTKYTSIADSKKFISSFDRIMYVPEEDLFEFALDYKNFSRTDADYIKKWKLYSYGNRIRIFRNP
KKNNVEDWEEVCLTSAYKELENKYGINYQQGDIRALLCEQSDKAFYSSFMALMSLMLQMRNSITGRTDVDFLISPVK
NSDGIFYDSRNYEAQENAILPKNADANGAYNIARKVLWAIGQFKKAEDEKLDKVKIAISNKEWLEYAQTSVKH
XPXPXPXPXPXPXPXPXPXPXPXPXPXPMVSKGEEDNMAIIKEFMRFKVHMEGSVNGHEFEIEGEGEGRPYEGTQT
AKLKVTKGGPLPFAWDILSPQFMYGSKAYVKHPADIPDYLKLSFPEGFKWERVMNFEDGGVVTVTQDSSLQDGEFI
YKVKLRGTNFPSDGPVMQKKTMGWEASSERMYPEDGALKGEIKQRLKLKDGGHYDAEVKTTYKAKKPVQLPGAYNV
NIKLDITSHNEDYTIVEQYERAEGRHSTGGMDELYK
FDNRENMESEEAKSTSIAFRCINENLTRYISNMDIFEKVDAIFDKHEVQEIKEKILNSDYDVEDFFEGEFFNEVLIQ
EGIDVYNAIIGGFVTESGEKIKGLNEYINLYNQKTKQKLPKFKPLYKQVLSDRESLSFYGEGYTSDEEVLEVERNTL
NKNSEIFSSIKKLEKLFKNFDEYSSAGIFVKNGPAISTISKDIFGEWNVIRDKWNAEYDDIHLKKKAVVTEKYEDDR
RKSFKKIGSFSLEQLQEYADADLSVVEKLKEIIIQKVDEIYKVYGSSEKLFDADFVLEKSLKKNDAVVAIMKDLLDS
VKSFENYIKAFFGEGKETNRDESFYGDFVLAYDILLKVDHIYDAIRNYVTQKPYSKDKFKLYFQNPQFMGGWDKDKE
TDYRATILRYGSKYYLAIMDKKYAKCLQKIDKDDVNGNYEKINYKLLPGPNKMLPKVFFSKKWMAYYNPSEDIQKIY
KNGTFKKGDMFNLNDCHKLIDFFKDSISRYPKWSNAYDENFSETEKYKDIAGFYREVEEQGYKVSFESASKKEVDKL
VEEGKLYMFQIYNKDFSDKSHGTPNLHTMYFKLLFDENNHGQIRLSGGAELFMRRASLKKEELVVHPANSPIANKNP
DNPKKITTLSYDVYKDKRESEDQYELHIPIAINKCPKNIFKINTEVRVLLKHDDNPYVIGIDRGERNLLYIVVVDGK
GNIVEQYSLNEIINNFNGIRIKTDYHSLLDKKEKERFEARQNWTSIENIKELKAGYISQVVHKICELVEKYDAVIAL
EDLNSGFKNSRVKVEKQVYQKFEKMLIDKLNYMVDKKSNPCATGGALKGYQITNKFESFKSMSTQNGFIFYIPAWLT
SKIDPSTGFVNLLKTKYTSIADSKKFISSFDRIMYVPEEDLFEFALDYKNFSRTDADYIKKWKLYSYGNRIRIFRNP
KKNNVEDWEEVCLTSAYKELENKYGINYQQGDIRALLCEQSDKAFYSSFMALMSLMLQMRNSITGRTDVDFLISPVK
NSDGIFYDSRNYEAQENAILPKNADANGAYNIARKVLWAIGQFKKAEDEKLDKVKIAISNKEWLEYAQTSVKH
GGGGSEAAAKGGGGSMVSKGEEDNMAIIKEFMRFKVHMEGSVNGHEFEIEGEGEGRPYEGTQTAKLKVTKGGPLPF
AWDILSPQFMYGSKAYVKHPADIPDYLKLSFPEGFKWERVMNFEDGGVVTVTQDSSLQDGEFIYKVKLRGTNFPSD
GPVMQKKTMGWEASSERMYPEDGALKGEIKQRLKLKDGGHYDAEVKTTYKAKKPVQLPGAYNVNIKLDITSHNEDY
TIVEQYERAEGRHSTGGMDELYK

[0101] Table V.7 provides chimera fusion proteins between LbCas12a variant amino acid sequences (E795L), linker amino acid sequences (underlined), and eGFP amino acid sequences (bolded, italicized).

TABLE V.7
LbCas12a(E795L)-Linker-eGFP Chimeras

SEQ ID NO: 242
MSKLEKFTNCYSLSKTLRFKAIPVGKTQENIDNKRLLVEDEKRAEDYKGVKKLLDRYYLSFINDVLHSIKLKNLNNY
ISLFRKKTRTEKENKELENLEINLRKEIAKAFKGNEGYKSLFKKDIIETILPEFLDDKDEIALVNSENGETTAFTGE
FDNRENMESEEAKSTSIAFRCINENLTRYISNMDIFEKVDAIFDKHEVQEIKEKILNSDYDVEDFFEGEFFNEVLIQ
EGIDVYNAIIGGFVTESGEKIKGLNEYINLYNQKTKQKLPKFKPLYKQVLSDRESLSFYGEGYTSDEEVLEVERNTL
NKNSEIFSSIKKLEKLFKNFDEYSSAGIFVKNGPAISTISKDIFGEWNVIRDKWNAEYDDIHLKKKAVVTEKYEDDR
RKSFKKIGSFSLEQLQEYADADLSVVEKLKEIIIQKVDEIYKVYGSSEKLFDADFVLEKSLKKNDAVVAIMKDLLDS
VKSFENYIKAFFGEGKETNRDESFYGDFVLAYDILLKVDHIYDAIRNYVTQKPYSKDKFKLYFQNPQFMGGWDKDKE
TDYRATILRYGSKYYLAIMDKKYAKCLQKIDKDDVNGNYEKINYKLLPGPNKMLPKVFFSKKWMAYYNPSEDIQKIY
KNGTFKKGDMFNLNDCHKLIDFFKDSISRYPKWSNAYDENFSETEKYKDIAGFYREVEEQGYKVSFESASKKEVDKL
VEEGKLYMFQIYNKDFSDKSHGTPNLHTMYFKLLFDENNHGQIRLSGGAELFMRRASLKKEELVVHPANSPIANKNP
DNPKKITTLSYDVYKDKRESEDQYLLHIPIAINKCPKNIFKINTEVRVLLKHDDNPYVIGIDRGERNLLYIVVVDGK
GNIVEQYSLNEIINNFNGIRIKTDYHSLLDKKEKERFEARQNWTSIENIKELKAGYISQVVHKICELVEKYDAVIAL
EDLNSGFKNSRVKVEKQVYQKFEKMLIDKLNYMVDKKSNPCATGGALKGYQITNKFESFKSMSTQNGFIFYIPAWLT
SKIDPSTGFVNLLKTKYTSIADSKKFISSFDRIMYVPEEDLFEFALDYKNFSRTDADYIKKWKLYSYGNRIRIFRNP
KKNNVEDWEEVCLTSAYKELENKYGINYQQGDIRALLCEQSDKAFYSSFMALMSLMLQMRNSITGRTDVDFLISPVK
NSDGIFYDSRNYEAQENAILPKNADANGAYNIARKVLWAIGQFKKAEDEKLDKVKIAISNKEWLEYAQTSVKH
GSAGSAAGSGEFMVSKGEELFTGVVPILVELDGDVNGHKFSVSGEGEGDATYGKLTLKFICTTGKLPVPWPTLVTTV
TYGVQCFSRYPDHMKQHDFFKSAMPEGYVQERTIFFKDDGNYKTRAEVKFEGDTLVNRIELKGIDFKEDGNILGHKL
EYNYNSHNVYIMADKQKNGIKVNFKIRHNIEDGSVQLADHYQQNTPIGDGPVLLPDNHYLSTQSALSKDPNEKRDHM
VLLEFVTAAGITLGMDELYK
SEQ ID NO: 243
MSKLEKFTNCYSLSKTLRFKAIPVGKTQENIDNKRLLVEDEKRAEDYKGVKKLLDRYYLSFINDVLHSIKLKNLNNY
ISLFRKKTRTEKENKELENLEINLRKEIAKAFKGNEGYKSLFKKDIIETILPEFLDDKDEIALVNSENGETTAFTGE
FDNRENMESEEAKSTSIAFRCINENLTRYISNMDIFEKVDAIFDKHEVQEIKEKILNSDYDVEDFFEGEFFNEVLIQ
EGIDVYNAIIGGFVTESGEKIKGLNEYINLYNQKTKQKLPKFKPLYKQVLSDRESLSFYGEGYTSDEEVLEVERNTL
NKNSEIFSSIKKLEKLFKNFDEYSSAGIFVKNGPAISTISKDIFGEWNVIRDKWNAEYDDIHLKKKAVVTEKYEDDR
RKSFKKIGSFSLEQLQEYADADLSVVEKLKEIIIQKVDEIYKVYGSSEKLFDADFVLEKSLKKNDAVVAIMKDLLDS
VKSFENYIKAFFGEGKETNRDESFYGDFVLAYDILLKVDHIYDAIRNYVTQKPYSKDKFKLYFQNPQFMGGWDKDKE
TDYRATILRYGSKYYLAIMDKKYAKCLQKIDKDDVNGNYEKINYKLLPGPNKMLPKVFFSKKWMAYYNPSEDIQKIY
KNGTFKKGDMFNLNDCHKLIDFFKDSISRYPKWSNAYDENFSETEKYKDIAGFYREVEEQGYKVSFESASKKEVDKL
VEEGKLYMFQIYNKDFSDKSHGTPNLHTMYFKLLFDENNHGQIRLSGGAELFMRRASLKKEELVVHPANSPIANKNP
DNPKKITTLSYDVYKDKRESEDQYLLHIPIAINKCPKNIFKINTEVRVLLKHDDNPYVIGIDRGERNLLYIVVVDGK
GNIVEQYSLNEIINNFNGIRIKTDYHSLLDKKEKERFEARQNWTSIENIKELKAGYISQVVHKICELVEKYDAVIAL
EDLNSGFKNSRVKVEKQVYQKFEKMLIDKLNYMVDKKSNPCATGGALKGYQITNKFESFKSMSTQNGFIFYIPAWLT
SKIDPSTGFVNLLKTKYTSIADSKKFISSFDRIMYVPEEDLFEFALDYKNFSRTDADYIKKWKLYSYGNRIRIFRNP
KKNNVEDWEEVCLTSAYKELENKYGINYQQGDIRALLCEQSDKAFYSSFMALMSLMLQMRNSITGRTDVDFLISPVK
NSDGIFYDSRNYEAQENAILPKNADANGAYNIARKVLWAIGQFKKAEDEKLDKVKIAISNKEWLEYAQTSVKH
GGGGSGGGGSGGGGSGGGGSMVSKGEELFTGVVPILVELDGDVNGHKFSVSGEGEGDATYGKLTLKFICTTGKLPVP
WPTLVTTVTYGVQCFSRYPDHMKQHDFFKSAMPEGYVQERTIFFKDDGNYKTRAEVKFEGDTLVNRIELKGIDFKED
GNILGHKLEYNYNSHNVYIMADKQKNGIKVNFKIRHNIEDGSVQLADHYQQNTPIGDGPVLLPDNHYLSTQSALSKD
PNEKRDHMVLLEFVTAAGITLGMDELYK
SEQ ID NO: 244
MSKLEKFTNCYSLSKTLRFKAIPVGKTQENIDNKRLLVEDEKRAEDYKGVKKLLDRYYLSFINDVLHSIKLKNLNNY
ISLFRKKTRTEKENKELENLEINLRKEIAKAFKGNEGYKSLFKKDIIETILPEFLDDKDEIALVNSENGETTAFTGE
FDNRENMESEEAKSTSIAFRCINENLTRYISNMDIFEKVDAIFDKHEVQEIKEKILNSDYDVEDFFEGEFFNEVLIQ
EGIDVYNAIIGGFVTESGEKIKGLNEYINLYNQKTKQKLPKFKPLYKQVLSDRESLSFYGEGYTSDEEVLEVERNTL
NKNSEIFSSIKKLEKLFKNFDEYSSAGIFVKNGPAISTISKDIFGEWNVIRDKWNAEYDDIHLKKKAVVTEKYEDDR
RKSFKKIGSFSLEQLQEYADADLSVVEKLKEIIIQKVDEIYKVYGSSEKLFDADFVLEKSLKKNDAVVAIMKDLLDS
VKSFENYIKAFFGEGKETNRDESFYGDFVLAYDILLKVDHIYDAIRNYVTQKPYSKDKFKLYFQNPQFMGGWDKDKE
TDYRATILRYGSKYYLAIMDKKYAKCLQKIDKDDVNGNYEKINYKLLPGPNKMLPKVFFSKKWMAYYNPSEDIQKIY
KNGTFKKGDMFNLNDCHKLIDFFKDSISRYPKWSNAYDENFSETEKYKDIAGFYREVEEQGYKVSFESASKKEVDKL
VEEGKLYMFQIYNKDFSDKSHGTPNLHTMYFKLLFDENNHGQIRLSGGAELFMRRASLKKEELVVHPANSPIANKNP
DNPKKITTLSYDVYKDKRESEDQYLLHIPIAINKCPKNIFKINTEVRVLLKHDDNPYVIGIDRGERNLLYIVVVDGK
GNIVEQYSLNEIINNFNGIRIKTDYHSLLDKKEKERFEARQNWTSIENIKELKAGYISQVVHKICELVEKYDAVIAL
EDLNSGFKNSRVKVEKQVYQKFEKMLIDKLNYMVDKKSNPCATGGALKGYQITNKFESFKSMSTQNGFIFYIPAWLT
SKIDPSTGFVNLLKTKYTSIADSKKFISSFDRIMYVPEEDLFEFALDYKNFSRTDADYIKKWKLYSYGNRIRIFRNP
KKNNVEDWEEVCLTSAYKELENKYGINYQQGDIRALLCEQSDKAFYSSFMALMSLMLQMRNSITGRTDVDFLISPVK
NSDGIFYDSRNYEAQENAILPKNADANGAYNIARKVLWAIGQFKKAEDEKLDKVKIAISNKEWLEYAQTSVKH
AEAAAKEAAAKEAAAKEAAAKAMVSKGEELFTGVVPILVELDGDVNGHKFSVSGEGEGDATYGKLTLKFICTTGKLP
VPWPTLVTTVTYGVQCFSRYPDHMKQHDFFKSAMPEGYVQERTIFFKDDGNYKTRAEVKFEGDTLVNRIELKGIDFK
EDGNILGHKLEYNYNSHNVYIMADKQKNGIKVNFKIRHNIEDGSVQLADHYQQNTPIGDGPVLLPDNHYLSTQSALS
KDPNEKRDHMVLLEFVTAAGITLGMDELYK
SEQ ID NO: 245
MSKLEKFTNCYSLSKTLRFKAIPVGKTQENIDNKRLLVEDEKRAEDYKGVKKLLDRYYLSFINDVLHSIKLKNLNNY
ISLFRKKTRTEKENKELENLEINLRKEIAKAFKGNEGYKSLFKKDIIETILPEFLDDKDEIALVNSENGETTAFTGE
FDNRENMESEEAKSTSIAFRCINENLTRYISNMDIFEKVDAIFDKHEVQEIKEKILNSDYDVEDFFEGEFFNEVLIQ
EGIDVYNAIIGGFVTESGEKIKGLNEYINLYNQKTKQKLPKFKPLYKQVLSDRESLSFYGEGYTSDEEVLEVERNTL
NKNSEIFSSIKKLEKLFKNFDEYSSAGIFVKNGPAISTISKDIFGEWNVIRDKWNAEYDDIHLKKKAVVTEKYEDDR
RKSFKKIGSFSLEQLQEYADADLSVVEKLKEIIIQKVDEIYKVYGSSEKLFDADFVLEKSLKKNDAVVAIMKDLLDS
VKSFENYIKAFFGEGKETNRDESFYGDFVLAYDILLKVDHIYDAIRNYVTQKPYSKDKFKLYFQNPQFMGGWDKDKE
TDYRATILRYGSKYYLAIMDKKYAKCLQKIDKDDVNGNYEKINYKLLPGPNKMLPKVFFSKKWMAYYNPSEDIQKIY
KNGTFKKGDMFNLNDCHKLIDFFKDSISRYPKWSNAYDENFSETEKYKDIAGFYREVEEQGYKVSFESASKKEVDKL
VEEGKLYMFQIYNKDFSDKSHGTPNLHTMYFKLLFDENNHGQIRLSGGAELFMRRASLKKEELVVHPANSPIANKNP
DNPKKITTLSYDVYKDKRESEDQYLLHIPIAINKCPKNIFKINTEVRVLLKHDDNPYVIGIDRGERNLLYIVVVDGK
GNIVEQYSLNEIINNFNGIRIKTDYHSLLDKKEKERFEARQNWTSIENIKELKAGYISQVVHKICELVEKYDAVIAL
EDLNSGFKNSRVKVEKQVYQKFEKMLIDKLNYMVDKKSNPCATGGALKGYQITNKFESFKSMSTQNGFIFYIPAWLT
SKIDPSTGFVNLLKTKYTSIADSKKFISSFDRIMYVPEEDLFEFALDYKNFSRTDADYIKKWKLYSYGNRIRIFRNP
KKNNVEDWEEVCLTSAYKELENKYGINYQQGDIRALLCEQSDKAFYSSFMALMSLMLQMRNSITGRTDVDFLISPVK
NSDGIFYDSRNYEAQENAILPKNADANGAYNIARKVLWAIGQFKKAEDEKLDKVKIAISNKEWLEYAQTSVKH
AEAAAKEAAAKEAAAKEAAAKALEAEAAAKEAAAKEAAAKEAAAKAMVSKGEELFTGVVPILVELDGDVNGHKFSVS
GEGEGDATYGKLTLKFICTTGKLPVPWPTLVTTVTYGVQCFSRYPDHMKQHDFFKSAMPEGYVQERTIFFKDDGNYK
TRAEVKFEGDTLVNRIELKGIDFKEDGNILGHKLEYNYNSHNVYIMADKQKNGIKVNFKIRHNIEDGSVQLADHYQQ
NTPIGDGPVLLPDNHYLSTQSALSKDPNEKRDHMVLLEFVTAAGITLGMDELYK
SEQ ID NO: 246
MSKLEKFTNCYSLSKTLRFKAIPVGKTQENIDNKRLLVEDEKRAEDYKGVKKLLDRYYLSFINDVLHSIKLKNLNNY
ISLFRKKTRTEKENKELENLEINLRKEIAKAFKGNEGYKSLFKKDIIETILPEFLDDKDEIALVNSENGETTAFTGE
FDNRENMESEEAKSTSIAFRCINENLTRYISNMDIFEKVDAIFDKHEVQEIKEKILNSDYDVEDFFEGEFFNEVLIQ
EGIDVYNAIIGGFVTESGEKIKGLNEYINLYNQKTKQKLPKFKPLYKQVLSDRESLSFYGEGYTSDEEVLEVERNTL
NKNSEIFSSIKKLEKLFKNFDEYSSAGIFVKNGPAISTISKDIFGEWNVIRDKWNAEYDDIHLKKKAVVTEKYEDDR
RKSFKKIGSFSLEQLQEYADADLSVVEKLKEIIIQKVDEIYKVYGSSEKLFDADFVLEKSLKKNDAVVAIMKDLLDS
VKSFENYIKAFFGEGKETNRDESFYGDFVLAYDILLKVDHIYDAIRNYVTQKPYSKDKFKLYFQNPQFMGGWDKDKE
TDYRATILRYGSKYYLAIMDKKYAKCLQKIDKDDVNGNYEKINYKLLPGPNKMLPKVFFSKKWMAYYNPSEDIQKIY
KNGTFKKGDMFNLNDCHKLIDFFKDSISRYPKWSNAYDENFSETEKYKDIAGFYREVEEQGYKVSFESASKKEVDKL
VEEGKLYMFQIYNKDFSDKSHGTPNLHTMYFKLLFDENNHGQIRLSGGAELFMRRASLKKEELVVHPANSPIANKNP
DNPKKITTLSYDVYKDKRESEDQYLLHIPIAINKCPKNIFKINTEVRVLLKHDDNPYVIGIDRGERNLLYIVVVDGK
GNIVEQYSLNEIINNFNGIRIKTDYHSLLDKKEKERFEARQNWTSIENIKELKAGYISQVVHKICELVEKYDAVIAL
EDLNSGFKNSRVKVEKQVYQKFEKMLIDKLNYMVDKKSNPCATGGALKGYQITNKFESFKSMSTQNGFIFYIPAWLT
SKIDPSTGFVNLLKTKYTSIADSKKFISSFDRIMYVPEEDLFEFALDYKNFSRTDADYIKKWKLYSYGNRIRIFRNP
KKNNVEDWEEVCLTSAYKELENKYGINYQQGDIRALLCEQSDKAFYSSFMALMSLMLQMRNSITGRTDVDFLISPVK
NSDGIFYDSRNYEAQENAILPKNADANGAYNIARKVLWAIGQFKKAEDEKLDKVKIAISNKEWLEYAQTSVKH
LEAEAAAKEAAAKEAAAKEAAAKALEAEAAAKEAAAKEAAAKEAAAKALEMVSKGEELFTGVVPILVELDGDVNGHK
FSVSGEGEGDATYGKLTLKFICTTGKLPVPWPTLVTTVTYGVQCFSRYPDHMKQHDFFKSAMPEGYVQERTIFFKDD
GNYKTRAEVKFEGDTLVNRIELKGIDFKEDGNILGHKLEYNYNSHNVYIMADKQKNGIKVNFKIRHNIEDGSVQLAD
HYQQNTPIGDGPVLLPDNHYLSTQSALSKDPNEKRDHMVLLEFVTAAGITLGMDELYK
SEQ ID NO: 247
MSKLEKFTNCYSLSKTLRFKAIPVGKTQENIDNKRLLVEDEKRAEDYKGVKKLLDRYYLSFINDVLHSIKLKNLNNY
ISLFRKKTRTEKENKELENLEINLRKEIAKAFKGNEGYKSLFKKDIIETILPEFLDDKDEIALVNSENGETTAFTGE
FDNRENMESEEAKSTSIAFRCINENLTRYISNMDIFEKVDAIFDKHEVQEIKEKILNSDYDVEDFFEGEFFNEVLIQ
EGIDVYNAIIGGFVTESGEKIKGLNEYINLYNQKTKQKLPKFKPLYKQVLSDRESLSFYGEGYTSDEEVLEVERNTL
NKNSEIFSSIKKLEKLFKNFDEYSSAGIFVKNGPAISTISKDIFGEWNVIRDKWNAEYDDIHLKKKAVVTEKYEDDR
RKSFKKIGSFSLEQLQEYADADLSVVEKLKEIIIQKVDEIYKVYGSSEKLFDADFVLEKSLKKNDAVVAIMKDLLDS
VKSFENYIKAFFGEGKETNRDESFYGDFVLAYDILLKVDHIYDAIRNYVTQKPYSKDKFKLYFQNPQFMGGWDKDKE
TDYRATILRYGSKYYLAIMDKKYAKCLQKIDKDDVNGNYEKINYKLLPGPNKMLPKVFFSKKWMAYYNPSEDIQKIY
KNGTFKKGDMFNLNDCHKLIDFFKDSISRYPKWSNAYDENFSETEKYKDIAGFYREVEEQGYKVSFESASKKEVDKL
VEEGKLYMFQIYNKDFSDKSHGTPNLHTMYFKLLFDENNHGQIRLSGGAELFMRRASLKKEELVVHPANSPIANKNP
DNPKKITTLSYDVYKDKRESEDQYLLHIPIAINKCPKNIFKINTEVRVLLKHDDNPYVIGIDRGERNLLYIVVVDGK
GNIVEQYSLNEIINNFNGIRIKTDYHSLLDKKEKERFEARQNWTSIENIKELKAGYISQVVHKICELVEKYDAVIAL
EDLNSGFKNSRVKVEKQVYQKFEKMLIDKLNYMVDKKSNPCATGGALKGYQITNKFESFKSMSTQNGFIFYIPAWLT
SKIDPSTGFVNLLKTKYTSIADSKKFISSFDRIMYVPEEDLFEFALDYKNFSRTDADYIKKWKLYSYGNRIRIFRNP
KKNNVEDWEEVCLTSAYKELENKYGINYQQGDIRALLCEQSDKAFYSSFMALMSLMLQMRNSITGRTDVDFLISPVK
NSDGIFYDSRNYEAQENAILPKNADANGAYNIARKVLWAIGQFKKAEDEKLDKVKIAISNKEWLEYAQTSVKH
APAMVSKGEELFTGVVPILVELDGDVNGHKFSVSGEGEGDATYGKLTLKFICTTGKLPVPWPTLVTTVTYGVQCFSR
YPDHMKQHDFFKSAMPEGYVQERTIFFKDDGNYKTRAEVKFEGDTLVNRIELKGIDFKEDGNILGHKLEYNYNSHNV
YIMADKQKNGIKVNFKIRHNIEDGSVQLADHYQQNTPIGDGPVLLPDNHYLSTQSALSKDPNEKRDHMVLLEFVTAA
GITLGMDELYK
SEQ ID NO: 248
MSKLEKFTNCYSLSKTLRFKAIPVGKTQENIDNKRLLVEDEKRAEDYKGVKKLLDRYYLSFINDVLHSIKLKNLNNY
ISLFRKKTRTEKENKELENLEINLRKEIAKAFKGNEGYKSLFKKDIIETILPEFLDDKDEIALVNSENGETTAFTGE
FDNRENMESEEAKSTSIAFRCINENLTRYISNMDIFEKVDAIFDKHEVQEIKEKILNSDYDVEDFFEGEFFNEVLIQ
EGIDVYNAIIGGFVTESGEKIKGLNEYINLYNQKTKQKLPKFKPLYKQVLSDRESLSFYGEGYTSDEEVLEVERNTL
NKNSEIFSSIKKLEKLFKNFDEYSSAGIFVKNGPAISTISKDIFGEWNVIRDKWNAEYDDIHLKKKAVVTEKYEDDR
RKSFKKIGSFSLEQLQEYADADLSVVEKLKEIIIQKVDEIYKVYGSSEKLFDADFVLEKSLKKNDAVVAIMKDLLDS
VKSFENYIKAFFGEGKETNRDESFYGDFVLAYDILLKVDHIYDAIRNYVTQKPYSKDKFKLYFQNPQFMGGWDKDKE
TDYRATILRYGSKYYLAIMDKKYAKCLQKIDKDDVNGNYEKINYKLLPGPNKMLPKVFFSKKWMAYYNPSEDIQKIY
KNGTFKKGDMFNLNDCHKLIDFFKDSISRYPKWSNAYDENFSETEKYKDIAGFYREVEEQGYKVSFESASKKEVDKL
VEEGKLYMFQIYNKDFSDKSHGTPNLHTMYFKLLFDENNHGQIRLSGGAELFMRRASLKKEELVVHPANSPIANKNP
DNPKKITTLSYDVYKDKRESEDQYLLHIPIAINKCPKNIFKINTEVRVLLKHDDNPYVIGIDRGERNLLYIVVVDGK
GNIVEQYSLNEIINNFNGIRIKTDYHSLLDKKEKERFEARQNWTSIENIKELKAGYISQVVHKICELVEKYDAVIAL
EDLNSGFKNSRVKVEKQVYQKFEKMLIDKLNYMVDKKSNPCATGGALKGYQITNKFESFKSMSTQNGFIFYIPAWLT
SKIDPSTGFVNLLKTKYTSIADSKKFISSFDRIMYVPEEDLFEFALDYKNFSRTDADYIKKWKLYSYGNRIRIFRNP
KKNNVEDWEEVCLTSAYKELENKYGINYQQGDIRALLCEQSDKAFYSSFMALMSLMLQMRNSITGRTDVDFLISPVK
NSDGIFYDSRNYEAQENAILPKNADANGAYNIARKVLWAIGQFKKAEDEKLDKVKIAISNKEWLEYAQTSVKH
APAPAMVSKGEELFTGVVPILVELDGDVNGHKFSVSGEGEGDATYGKLTLKFICTTGKLPVPWPTLVTTVTYGVQCF
SRYPDHMKQHDFFKSAMPEGYVQERTIFFKDDGNYKTRAEVKFEGDTLVNRIELKGIDFKEDGNILGHKLEYNYNSH
NVYIMADKQKNGIKVNFKIRHNIEDGSVQLADHYQQNTPIGDGPVLLPDNHYLSTQSALSKDPNEKRDHMVLLEFVT
AAGITLGMDELYK
SEQ ID NO: 249
MSKLEKFTNCYSLSKTLRFKAIPVGKTQENIDNKRLLVEDEKRAEDYKGVKKLLDRYYLSFINDVLHSIKLKNLNNY
ISLFRKKTRTEKENKELENLEINLRKEIAKAFKGNEGYKSLFKKDIIETILPEFLDDKDEIALVNSENGETTAFTGE
FDNRENMESEEAKSTSIAFRCINENLTRYISNMDIFEKVDAIFDKHEVQEIKEKILNSDYDVEDFFEGEFFNEVLIQ
EGIDVYNAIIGGFVTESGEKIKGLNEYINLYNQKTKQKLPKFKPLYKQVLSDRESLSFYGEGYTSDEEVLEVERNTL
NKNSEIFSSIKKLEKLFKNFDEYSSAGIFVKNGPAISTISKDIFGEWNVIRDKWNAEYDDIHLKKKAVVTEKYEDDR
RKSFKKIGSFSLEQLQEYADADLSVVEKLKEIIIQKVDEIYKVYGSSEKLFDADFVLEKSLKKNDAVVAIMKDLLDS
VKSFENYIKAFFGEGKETNRDESFYGDFVLAYDILLKVDHIYDAIRNYVTQKPYSKDKFKLYFQNPQFMGGWDKDKE
TDYRATILRYGSKYYLAIMDKKYAKCLQKIDKDDVNGNYEKINYKLLPGPNKMLPKVFFSKKWMAYYNPSEDIQKIY
KNGTFKKGDMFNLNDCHKLIDFFKDSISRYPKWSNAYDENFSETEKYKDIAGFYREVEEQGYKVSFESASKKEVDKL
VEEGKLYMFQIYNKDFSDKSHGTPNLHTMYFKLLFDENNHGQIRLSGGAELFMRRASLKKEELVVHPANSPIANKNP
DNPKKITTLSYDVYKDKRESEDQYLLHIPIAINKCPKNIFKINTEVRVLLKHDDNPYVIGIDRGERNLLYIVVVDGK
GNIVEQYSLNEIINNFNGIRIKTDYHSLLDKKEKERFEARQNWTSIENIKELKAGYISQVVHKICELVEKYDAVIAL
EDLNSGFKNSRVKVEKQVYQKFEKMLIDKLNYMVDKKSNPCATGGALKGYQITNKFESFKSMSTQNGFIFYIPAWLT
SKIDPSTGFVNLLKTKYTSIADSKKFISSFDRIMYVPEEDLFEFALDYKNFSRTDADYIKKWKLYSYGNRIRIFRNP
KKNNVEDWEEVCLTSAYKELENKYGINYQQGDIRALLCEQSDKAFYSSFMALMSLMLQMRNSITGRTDVDFLISPVK
NSDGIFYDSRNYEAQENAILPKNADANGAYNIARKVLWAIGQFKKAEDEKLDKVKIAISNKEWLEYAQTSVKH
APAPAPAMVSKGEELFTGVVPILVELDGDVNGHKFSVSGEGEGDATYGKLTLKFICTTGKLPVPWPTLVTTVTYGVQ
CFSRYPDHMKQHDFFKSAMPEGYVQERTIFFKDDGNYKTRAEVKFEGDTLVNRIELKGIDFKEDGNILGHKLEYNYN
SHNVYIMADKQKNGIKVNFKIRHNIEDGSVQLADHYQQNTPIGDGPVLLPDNHYLSTQSALSKDPNEKRDHMVLLEF
VTAAGITLGMDELYK
SEQ ID NO: 250
MSKLEKFTNCYSLSKTLRFKAIPVGKTQENIDNKRLLVEDEKRAEDYKGVKKLLDRYYLSFINDVLHSIKLKNLNNY
ISLFRKKTRTEKENKELENLEINLRKEIAKAFKGNEGYKSLFKKDIIETILPEFLDDKDEIALVNSENGETTAFTGE
FDNRENMESEEAKSTSIAFRCINENLTRYISNMDIFEKVDAIFDKHEVQEIKEKILNSDYDVEDFFEGEFFNEVLIQ
EGIDVYNAIIGGFVTESGEKIKGLNEYINLYNQKTKQKLPKFKPLYKQVLSDRESLSFYGEGYTSDEEVLEVERNTL
NKNSEIFSSIKKLEKLFKNFDEYSSAGIFVKNGPAISTISKDIFGEWNVIRDKWNAEYDDIHLKKKAVVTEKYEDDR
RKSFKKIGSFSLEQLQEYADADLSVVEKLKEIIIQKVDEIYKVYGSSEKLFDADFVLEKSLKKNDAVVAIMKDLLDS
VKSFENYIKAFFGEGKETNRDESFYGDFVLAYDILLKVDHIYDAIRNYVTQKPYSKDKFKLYFQNPQFMGGWDKDKE
TDYRATILRYGSKYYLAIMDKKYAKCLQKIDKDDVNGNYEKINYKLLPGPNKMLPKVFFSKKWMAYYNPSEDIQKIY
KNGTFKKGDMFNLNDCHKLIDFFKDSISRYPKWSNAYDENFSETEKYKDIAGFYREVEEQGYKVSFESASKKEVDKL
VEEGKLYMFQIYNKDFSDKSHGTPNLHTMYFKLLFDENNHGQIRLSGGAELFMRRASLKKEELVVHPANSPIANKNP
DNPKKITTLSYDVYKDKRESEDQYLLHIPIAINKCPKNIFKINTEVRVLLKHDDNPYVIGIDRGERNLLYIVVVDGK
GNIVEQYSLNEIINNFNGIRIKTDYHSLLDKKEKERFEARQNWTSIENIKELKAGYISQVVHKICELVEKYDAVIAL
EDLNSGFKNSRVKVEKQVYQKFEKMLIDKLNYMVDKKSNPCATGGALKGYQITNKFESFKSMSTQNGFIFYIPAWLT
SKIDPSTGFVNLLKTKYTSIADSKKFISSFDRIMYVPEEDLFEFALDYKNFSRTDADYIKKWKLYSYGNRIRIFRNP
KKNNVEDWEEVCLTSAYKELENKYGINYQQGDIRALLCEQSDKAFYSSFMALMSLMLQMRNSITGRTDVDFLISPVK
NSDGIFYDSRNYEAQENAILPKNADANGAYNIARKVLWAIGQFKKAEDEKLDKVKIAISNKEWLEYAQTSVKH
APAPAPAPAMVSKGEELFTGVVPILVELDGDVNGHKFSVSGEGEGDATYGKLTLKFICTTGKLPVPWPTLVTTVTYG
VQCFSRYPDHMKQHDFFKSAMPEGYVQERTIFFKDDGNYKTRAEVKFEGDTLVNRIELKGIDFKEDGNILGHKLEYN
YNSHNVYIMADKQKNGIKVNFKIRHNIEDGSVQLADHYQQNTPIGDGPVLLPDNHYLSTQSALSKDPNEKRDHMVLL
EFVTAAGITLGMDELYK
SEQ ID NO: 251
MSKLEKFTNCYSLSKTLRFKAIPVGKTQENIDNKRLLVEDEKRAEDYKGVKKLLDRYYLSFINDVLHSIKLKNLNNY
ISLFRKKTRTEKENKELENLEINLRKEIAKAFKGNEGYKSLFKKDIIETILPEFLDDKDEIALVNSENGETTAFTGE
FDNRENMESEEAKSTSIAFRCINENLTRYISNMDIFEKVDAIFDKHEVQEIKEKILNSDYDVEDFFEGEFFNEVLIQ
EGIDVYNAIIGGFVTESGEKIKGLNEYINLYNQKTKQKLPKFKPLYKQVLSDRESLSFYGEGYTSDEEVLEVERNTL
NKNSEIFSSIKKLEKLFKNFDEYSSAGIFVKNGPAISTISKDIFGEWNVIRDKWNAEYDDIHLKKKAVVTEKYEDDR
RKSFKKIGSFSLEQLQEYADADLSVVEKLKEIIIQKVDEIYKVYGSSEKLFDADFVLEKSLKKNDAVVAIMKDLLDS
VKSFENYIKAFFGEGKETNRDESFYGDFVLAYDILLKVDHIYDAIRNYVTQKPYSKDKFKLYFQNPQFMGGWDKDKE
TDYRATILRYGSKYYLAIMDKKYAKCLQKIDKDDVNGNYEKINYKLLPGPNKMLPKVFFSKKWMAYYNPSEDIQKIY
KNGTFKKGDMFNLNDCHKLIDFFKDSISRYPKWSNAYDENFSETEKYKDIAGFYREVEEQGYKVSFESASKKEVDKL
VEEGKLYMFQIYNKDFSDKSHGTPNLHTMYFKLLFDENNHGQIRLSGGAELFMRRASLKKEELVVHPANSPIANKNP
DNPKKITTLSYDVYKDKRESEDQYLLHIPIAINKCPKNIFKINTEVRVLLKHDDNPYVIGIDRGERNLLYIVVVDGK
GNIVEQYSLNEIINNFNGIRIKTDYHSLLDKKEKERFEARQNWTSIENIKELKAGYISQVVHKICELVEKYDAVIAL
EDLNSGFKNSRVKVEKQVYQKFEKMLIDKLNYMVDKKSNPCATGGALKGYQITNKFESFKSMSTQNGFIFYIPAWLT
SKIDPSTGFVNLLKTKYTSIADSKKFISSFDRIMYVPEEDLFEFALDYKNFSRTDADYIKKWKLYSYGNRIRIFRNP
KKNNVEDWEEVCLTSAYKELENKYGINYQQGDIRALLCEQSDKAFYSSFMALMSLMLQMRNSITGRTDVDFLISPVK
NSDGIFYDSRNYEAQENAILPKNADANGAYNIARKVLWAIGQFKKAEDEKLDKVKIAISNKEWLEYAQTSVKH
APAPAPAPAPAMVSKGEELFTGVVPILVELDGDVNGHKFSVSGEGEGDATYGKLTLKFICTTGKLPVPWPTLVTTVT
YGVQCFSRYPDHMKQHDFFKSAMPEGYVQERTIFFKDDGNYKTRAEVKFEGDTLVNRIELKGIDFKEDGNILGHKLE
YNYNSHNVYIMADKQKNGIKVNFKIRHNIEDGSVQLADHYQQNTPIGDGPVLLPDNHYLSTQSALSKDPNEKRDHMV
LLEFVTAAGITLGMDELYK
SEQ ID NO: 252
MSKLEKFTNCYSLSKTLRFKAIPVGKTQENIDNKRLLVEDEKRAEDYKGVKKLLDRYYLSFINDVLHSIKLKNLNNY
ISLFRKKTRTEKENKELENLEINLRKEIAKAFKGNEGYKSLFKKDIIETILPEFLDDKDEIALVNSENGETTAFTGE
FDNRENMESEEAKSTSIAFRCINENLTRYISNMDIFEKVDAIFDKHEVQEIKEKILNSDYDVEDFFEGEFFNEVLIQ
EGIDVYNAIIGGFVTESGEKIKGLNEYINLYNQKTKQKLPKFKPLYKQVLSDRESLSFYGEGYTSDEEVLEVERNTL
NKNSEIFSSIKKLEKLFKNFDEYSSAGIFVKNGPAISTISKDIFGEWNVIRDKWNAEYDDIHLKKKAVVTEKYEDDR
RKSFKKIGSFSLEQLQEYADADLSVVEKLKEIIIQKVDEIYKVYGSSEKLFDADFVLEKSLKKNDAVVAIMKDLLDS
VKSFENYIKAFFGEGKETNRDESFYGDFVLAYDILLKVDHIYDAIRNYVTQKPYSKDKFKLYFQNPQFMGGWDKDKE
TDYRATILRYGSKYYLAIMDKKYAKCLQKIDKDDVNGNYEKINYKLLPGPNKMLPKVFFSKKWMAYYNPSEDIQKIY
KNGTFKKGDMFNLNDCHKLIDFFKDSISRYPKWSNAYDENFSETEKYKDIAGFYREVEEQGYKVSFESASKKEVDKL
VEEGKLYMFQIYNKDFSDKSHGTPNLHTMYFKLLFDENNHGQIRLSGGAELFMRRASLKKEELVVHPANSPIANKNP
DNPKKITTLSYDVYKDKRESEDQYLLHIPIAINKCPKNIFKINTEVRVLLKHDDNPYVIGIDRGERNLLYIVVVDGK
GNIVEQYSLNEIINNFNGIRIKTDYHSLLDKKEKERFEARQNWTSIENIKELKAGYISQVVHKICELVEKYDAVIAL
EDLNSGFKNSRVKVEKQVYQKFEKMLIDKLNYMVDKKSNPCATGGALKGYQITNKFESFKSMSTQNGFIFYIPAWLT
SKIDPSTGFVNLLKTKYTSIADSKKFISSFDRIMYVPEEDLFEFALDYKNFSRTDADYIKKWKLYSYGNRIRIFRNP
KKNNVEDWEEVCLTSAYKELENKYGINYQQGDIRALLCEQSDKAFYSSFMALMSLMLQMRNSITGRTDVDFLISPVK
NSDGIFYDSRNYEAQENAILPKNADANGAYNIARKVLWAIGQFKKAEDEKLDKVKIAISNKEWLEYAQTSVKH
APAPAPAPAPAPAMVSKGEELFTGVVPILVELDGDVNGHKFSVSGEGEGDATYGKLTLKFICTTGKLPVPWPTLVTT
VTYGVQCFSRYPDHMKQHDFFKSAMPEGYVQERTIFFKDDGNYKTRAEVKFEGDTLVNRIELKGIDFKEDGNILGHK
LEYNYNSHNVYIMADKQKNGIKVNFKIRHNIEDGSVQLADHYQQNTPIGDGPVLLPDNHYLSTQSALSKDPNEKRDH
MVLLEFVTAAGITLGMDELYK
SEQ ID NO: 253
MSKLEKFTNCYSLSKTLRFKAIPVGKTQENIDNKRLLVEDEKRAEDYKGVKKLLDRYYLSFINDVLHSIKLKNLNNY
ISLFRKKTRTEKENKELENLEINLRKEIAKAFKGNEGYKSLFKKDIIETILPEFLDDKDEIALVNSENGETTAFTGE
FDNRENMESEEAKSTSIAFRCINENLTRYISNMDIFEKVDAIFDKHEVQEIKEKILNSDYDVEDFFEGEFFNEVLIQ
EGIDVYNAIIGGFVTESGEKIKGLNEYINLYNQKTKQKLPKFKPLYKQVLSDRESLSFYGEGYTSDEEVLEVERNTL
NKNSEIFSSIKKLEKLFKNFDEYSSAGIFVKNGPAISTISKDIFGEWNVIRDKWNAEYDDIHLKKKAVVTEKYEDDR
RKSFKKIGSFSLEQLQEYADADLSVVEKLKEIIIQKVDEIYKVYGSSEKLFDADFVLEKSLKKNDAVVAIMKDLLDS
VKSFENYIKAFFGEGKETNRDESFYGDFVLAYDILLKVDHIYDAIRNYVTQKPYSKDKFKLYFQNPQFMGGWDKDKE
TDYRATILRYGSKYYLAIMDKKYAKCLQKIDKDDVNGNYEKINYKLLPGPNKMLPKVFFSKKWMAYYNPSEDIQKIY
KNGTFKKGDMFNLNDCHKLIDFFKDSISRYPKWSNAYDENFSETEKYKDIAGFYREVEEQGYKVSFESASKKEVDKL
VEEGKLYMFQIYNKDFSDKSHGTPNLHTMYFKLLFDENNHGQIRLSGGAELFMRRASLKKEELVVHPANSPIANKNP
DNPKKITTLSYDVYKDKRESEDQYLLHIPIAINKCPKNIFKINTEVRVLLKHDDNPYVIGIDRGERNLLYIVVVDGK
GNIVEQYSLNEIINNFNGIRIKTDYHSLLDKKEKERFEARQNWTSIENIKELKAGYISQVVHKICELVEKYDAVIAL
EDLNSGFKNSRVKVEKQVYQKFEKMLIDKLNYMVDKKSNPCATGGALKGYQITNKFESFKSMSTQNGFIFYIPAWLT
SKIDPSTGFVNLLKTKYTSIADSKKFISSFDRIMYVPEEDLFEFALDYKNFSRTDADYIKKWKLYSYGNRIRIFRNP
KKNNVEDWEEVCLTSAYKELENKYGINYQQGDIRALLCEQSDKAFYSSFMALMSLMLQMRNSITGRTDVDFLISPVK
NSDGIFYDSRNYEAQENAILPKNADANGAYNIARKVLWAIGQFKKAEDEKLDKVKIAISNKEWLEYAQTSVKH
APAPAPAPAPAPAPAMVSKGEELFTGVVPILVELDGDVNGHKFSVSGEGEGDATYGKLTLKFICTTGKLPVPWPTLV
TTVTYGVQCFSRYPDHMKQHDFFKSAMPEGYVQERTIFFKDDGNYKTRAEVKFEGDTLVNRIELKGIDFKEDGNILG
HKLEYNYNSHNVYIMADKQKNGIKVNFKIRHNIEDGSVQLADHYQQNTPIGDGPVLLPDNHYLSTQSALSKDPNEKR
DHMVLLEFVTAAGITLGMDELYK
SEQ ID NO: 254
MSKLEKFTNCYSLSKTLRFKAIPVGKTQENIDNKRLLVEDEKRAEDYKGVKKLLDRYYLSFINDVLHSIKLKNLNNY
ISLFRKKTRTEKENKELENLEINLRKEIAKAFKGNEGYKSLFKKDIIETILPEFLDDKDEIALVNSENGETTAFTGE
FDNRENMESEEAKSTSIAFRCINENLTRYISNMDIFEKVDAIFDKHEVQEIKEKILNSDYDVEDFFEGEFFNEVLIQ
EGIDVYNAIIGGFVTESGEKIKGLNEYINLYNQKTKQKLPKFKPLYKQVLSDRESLSFYGEGYTSDEEVLEVERNTL
NKNSEIFSSIKKLEKLFKNFDEYSSAGIFVKNGPAISTISKDIFGEWNVIRDKWNAEYDDIHLKKKAVVTEKYEDDR
RKSFKKIGSFSLEQLQEYADADLSVVEKLKEIIIQKVDEIYKVYGSSEKLFDADFVLEKSLKKNDAVVAIMKDLLDS
VKSFENYIKAFFGEGKETNRDESFYGDFVLAYDILLKVDHIYDAIRNYVTQKPYSKDKFKLYFQNPQFMGGWDKDKE
TDYRATILRYGSKYYLAIMDKKYAKCLQKIDKDDVNGNYEKINYKLLPGPNKMLPKVFFSKKWMAYYNPSEDIQKIY
KNGTFKKGDMFNLNDCHKLIDFFKDSISRYPKWSNAYDENFSETEKYKDIAGFYREVEEQGYKVSFESASKKEVDKL
VEEGKLYMFQIYNKDFSDKSHGTPNLHTMYFKLLFDENNHGQIRLSGGAELFMRRASLKKEELVVHPANSPIANKNP
DNPKKITTLSYDVYKDKRESEDQYLLHIPIAINKCPKNIFKINTEVRVLLKHDDNPYVIGIDRGERNLLYIVVVDGK
GNIVEQYSLNEIINNFNGIRIKTDYHSLLDKKEKERFEARQNWTSIENIKELKAGYISQVVHKICELVEKYDAVIAL
EDLNSGFKNSRVKVEKQVYQKFEKMLIDKLNYMVDKKSNPCATGGALKGYQITNKFESFKSMSTQNGFIFYIPAWLT
SKIDPSTGFVNLLKTKYTSIADSKKFISSFDRIMYVPEEDLFEFALDYKNFSRTDADYIKKWKLYSYGNRIRIFRNP
KKNNVEDWEEVCLTSAYKELENKYGINYQQGDIRALLCEQSDKAFYSSFMALMSLMLQMRNSITGRTDVDFLISPVK
NSDGIFYDSRNYEAQENAILPKNADANGAYNIARKVLWAIGQFKKAEDEKLDKVKIAISNKEWLEYAQTSVKH
APAPAPAPAPAPAPAPAMVSKGEELFTGVVPILVELDGDVNGHKFSVSGEGEGDATYGKLTLKFICTTGKLPVPWPT
LVTTVTYGVQCFSRYPDHMKQHDFFKSAMPEGYVQERTIFFKDDGNYKTRAEVKFEGDTLVNRIELKGIDFKEDGNI
LGHKLEYNYNSHNVYIMADKQKNGIKVNFKIRHNIEDGSVQLADHYQQNTPIGDGPVLLPDNHYLSTQSALSKDPNE
KRDHMVLLEFVTAAGITLGMDELYK
SEQ ID NO: 255
MSKLEKFTNCYSLSKTLRFKAIPVGKTQENIDNKRLLVEDEKRAEDYKGVKKLLDRYYLSFINDVLHSIKLKNLNNY
ISLFRKKTRTEKENKELENLEINLRKEIAKAFKGNEGYKSLFKKDIIETILPEFLDDKDEIALVNSENGETTAFTGE
FDNRENMESEEAKSTSIAFRCINENLTRYISNMDIFEKVDAIFDKHEVQEIKEKILNSDYDVEDFFEGEFFNEVLIQ
EGIDVYNAIIGGFVTESGEKIKGLNEYINLYNQKTKQKLPKFKPLYKQVLSDRESLSFYGEGYTSDEEVLEVERNTL
NKNSEIFSSIKKLEKLFKNFDEYSSAGIFVKNGPAISTISKDIFGEWNVIRDKWNAEYDDIHLKKKAVVTEKYEDDR
RKSFKKIGSFSLEQLQEYADADLSVVEKLKEIIIQKVDEIYKVYGSSEKLFDADFVLEKSLKKNDAVVAIMKDLLDS
VKSFENYIKAFFGEGKETNRDESFYGDFVLAYDILLKVDHIYDAIRNYVTQKPYSKDKFKLYFQNPQFMGGWDKDKE
TDYRATILRYGSKYYLAIMDKKYAKCLQKIDKDDVNGNYEKINYKLLPGPNKMLPKVFFSKKWMAYYNPSEDIQKIY
KNGTFKKGDMFNLNDCHKLIDFFKDSISRYPKWSNAYDENFSETEKYKDIAGFYREVEEQGYKVSFESASKKEVDKL
VEEGKLYMFQIYNKDFSDKSHGTPNLHTMYFKLLFDENNHGQIRLSGGAELFMRRASLKKEELVVHPANSPIANKNP
DNPKKITTLSYDVYKDKRESEDQYLLHIPIAINKCPKNIFKINTEVRVLLKHDDNPYVIGIDRGERNLLYIVVVDGK
GNIVEQYSLNEIINNFNGIRIKTDYHSLLDKKEKERFEARQNWTSIENIKELKAGYISQVVHKICELVEKYDAVIAL
EDLNSGFKNSRVKVEKQVYQKFEKMLIDKLNYMVDKKSNPCATGGALKGYQITNKFESFKSMSTQNGFIFYIPAWLT
SKIDPSTGFVNLLKTKYTSIADSKKFISSFDRIMYVPEEDLFEFALDYKNFSRTDADYIKKWKLYSYGNRIRIFRNP
KKNNVEDWEEVCLTSAYKELENKYGINYQQGDIRALLCEQSDKAFYSSFMALMSLMLQMRNSITGRTDVDFLISPVK
NSDGIFYDSRNYEAQENAILPKNADANGAYNIARKVLWAIGQFKKAEDEKLDKVKIAISNKEWLEYAQTSVKH
APAPAPAPAPAPAPAPAPAMVSKGEELFTGVVPILVELDGDVNGHKFSVSGEGEGDATYGKLTLKFICTTGKLPVPW
PTLVTTVTYGVQCFSRYPDHMKQHDFFKSAMPEGYVQERTIFFKDDGNYKTRAEVKFEGDTLVNRIELKGIDFKEDG
NILGHKLEYNYNSHNVYIMADKQKNGIKVNFKIRHNIEDGSVQLADHYQQNTPIGDGPVLLPDNHYLSTQSALSKDP
NEKRDHMVLLEFVTAAGITLGMDELYK
SEQ ID NO: 256
MTQFEGFTNLYQVSKTLRFELIPQGKTLKHIQEQGFIEEDKARNDHYKELKPIIDRIYKTYADQCLQLVQLDWENLS
MSKLEKFTNCYSLSKTLRFKAIPVGKTQENIDNKRLLVEDEKRAEDYKGVKKLLDRYYLSFINDVLHSIKLKNLNNY
ISLFRKKTRTEKENKELENLEINLRKEIAKAFKGNEGYKSLFKKDIIETILPEFLDDKDEIALVNSENGETTAFTGE
FDNRENMESEEAKSTSIAFRCINENLTRYISNMDIFEKVDAIFDKHEVQEIKEKILNSDYDVEDFFEGEFFNEVLIQ
EGIDVYNAIIGGFVTESGEKIKGLNEYINLYNQKTKQKLPKFKPLYKQVLSDRESLSFYGEGYTSDEEVLEVERNTL
NKNSEIFSSIKKLEKLFKNFDEYSSAGIFVKNGPAISTISKDIFGEWNVIRDKWNAEYDDIHLKKKAVVTEKYEDDR
RKSFKKIGSFSLEQLQEYADADLSVVEKLKEIIIQKVDEIYKVYGSSEKLFDADFVLEKSLKKNDAVVAIMKDLLDS
VKSFENYIKAFFGEGKETNRDESFYGDFVLAYDILLKVDHIYDAIRNYVTQKPYSKDKFKLYFQNPQFMGGWDKDKE
TDYRATILRYGSKYYLAIMDKKYAKCLQKIDKDDVNGNYEKINYKLLPGPNKMLPKVFFSKKWMAYYNPSEDIQKIY
KNGTFKKGDMFNLNDCHKLIDFFKDSISRYPKWSNAYDENFSETEKYKDIAGFYREVEEQGYKVSFESASKKEVDKL
VEEGKLYMFQIYNKDFSDKSHGTPNLHTMYFKLLFDENNHGQIRLSGGAELFMRRASLKKEELVVHPANSPIANKNP
DNPKKITTLSYDVYKDKRESEDQYLLHIPIAINKCPKNIFKINTEVRVLLKHDDNPYVIGIDRGERNLLYIVVVDGK
GNIVEQYSLNEIINNFNGIRIKTDYHSLLDKKEKERFEARQNWTSIENIKELKAGYISQVVHKICELVEKYDAVIAL
EDLNSGFKNSRVKVEKQVYQKFEKMLIDKLNYMVDKKSNPCATGGALKGYQITNKFESFKSMSTQNGFIFYIPAWLT
SKIDPSTGFVNLLKTKYTSIADSKKFISSFDRIMYVPEEDLFEFALDYKNFSRTDADYIKKWKLYSYGNRIRIFRNP
KKNNVEDWEEVCLTSAYKELENKYGINYQQGDIRALLCEQSDKAFYSSFMALMSLMLQMRNSITGRTDVDFLISPVK
NSDGIFYDSRNYEAQENAILPKNADANGAYNIARKVLWAIGQFKKAEDEKLDKVKIAISNKEWLEYAQTSVKH
APAPAPAPAPAPAPAPAPAPAMVSKGEELFTGVVPILVELDGDVNGHKFSVSGEGEGDATYGKLTLKFICTTGKLPV
PWPTLVTTVTYGVQCFSRYPDHMKQHDFFKSAMPEGYVQERTIFFKDDGNYKTRAEVKFEGDTLVNRIELKGIDFKE
DGNILGHKLEYNYNSHNVYIMADKQKNGIKVNFKIRHNIEDGSVQLADHYQQNTPIGDGPVLLPDNHYLSTQSALSK
DPNEKRDHMVLLEFVTAAGITLGMDELYK
SEQ ID NO: 257
MSKLEKFTNCYSLSKTLRFKAIPVGKTQENIDNKRLLVEDEKRAEDYKGVKKLLDRYYLSFINDVLHSIKLKNLNNY
ISLFRKKTRTEKENKELENLEINLRKEIAKAFKGNEGYKSLFKKDIIETILPEFLDDKDEIALVNSENGETTAFTGE
FDNRENMESEEAKSTSIAFRCINENLTRYISNMDIFEKVDAIFDKHEVQEIKEKILNSDYDVEDFFEGEFFNEVLIQ
EGIDVYNAIIGGFVTESGEKIKGLNEYINLYNQKTKQKLPKFKPLYKQVLSDRESLSFYGEGYTSDEEVLEVERNTL
NKNSEIFSSIKKLEKLFKNFDEYSSAGIFVKNGPAISTISKDIFGEWNVIRDKWNAEYDDIHLKKKAVVTEKYEDDR
RKSFKKIGSFSLEQLQEYADADLSVVEKLKEIIIQKVDEIYKVYGSSEKLFDADFVLEKSLKKNDAVVAIMKDLLDS
VKSFENYIKAFFGEGKETNRDESFYGDFVLAYDILLKVDHIYDAIRNYVTQKPYSKDKFKLYFQNPQFMGGWDKDKE
TDYRATILRYGSKYYLAIMDKKYAKCLQKIDKDDVNGNYEKINYKLLPGPNKMLPKVFFSKKWMAYYNPSEDIQKIY
KNGTFKKGDMFNLNDCHKLIDFFKDSISRYPKWSNAYDENFSETEKYKDIAGFYREVEEQGYKVSFESASKKEVDKL
VEEGKLYMFQIYNKDFSDKSHGTPNLHTMYFKLLFDENNHGQIRLSGGAELFMRRASLKKEELVVHPANSPIANKNP
DNPKKITTLSYDVYKDKRESEDQYLLHIPIAINKCPKNIFKINTEVRVLLKHDDNPYVIGIDRGERNLLYIVVVDGK
GNIVEQYSLNEIINNFNGIRIKTDYHSLLDKKEKERFEARQNWTSIENIKELKAGYISQVVHKICELVEKYDAVIAL
EDLNSGFKNSRVKVEKQVYQKFEKMLIDKLNYMVDKKSNPCATGGALKGYQITNKFESFKSMSTQNGFIFYIPAWLT
SKIDPSTGFVNLLKTKYTSIADSKKFISSFDRIMYVPEEDLFEFALDYKNFSRTDADYIKKWKLYSYGNRIRIFRNP
KKNNVEDWEEVCLTSAYKELENKYGINYQQGDIRALLCEQSDKAFYSSFMALMSLMLQMRNSITGRTDVDFLISPVK
NSDGIFYDSRNYEAQENAILPKNADANGAYNIARKVLWAIGQFKKAEDEKLDKVKIAISNKEWLEYAQTSVKH
APAPAPAPAPAPAPAPAPAPAPAMVSKGEELFTGVVPILVELDGDVNGHKFSVSGEGEGDATYGKLTLKFICTTGKL
PVPWPTLVTTVTYGVQCFSRYPDHMKQHDFFKSAMPEGYVQERTIFFKDDGNYKTRAEVKFEGDTLVNRIELKGIDF
KEDGNILGHKLEYNYNSHNVYIMADKQKNGIKVNFKIRHNIEDGSVQLADHYQQNTPIGDGPVLLPDNHYLSTQSAL
SKDPNEKRDHMVLLEFVTAAGITLGMDELYK
SEQ ID NO: 258
MSKLEKFTNCYSLSKTLRFKAIPVGKTQENIDNKRLLVEDEKRAEDYKGVKKLLDRYYLSFINDVLHSIKLKNLNNY
ISLFRKKTRTEKENKELENLEINLRKEIAKAFKGNEGYKSLFKKDIIETILPEFLDDKDEIALVNSENGETTAFTGE
FDNRENMESEEAKSTSIAFRCINENLTRYISNMDIFEKVDAIFDKHEVQEIKEKILNSDYDVEDFFEGEFFNEVLIQ
EGIDVYNAIIGGFVTESGEKIKGLNEYINLYNQKTKQKLPKFKPLYKQVLSDRESLSFYGEGYTSDEEVLEVERNTL
NKNSEIFSSIKKLEKLFKNFDEYSSAGIFVKNGPAISTISKDIFGEWNVIRDKWNAEYDDIHLKKKAVVTEKYEDDR
RKSFKKIGSFSLEQLQEYADADLSVVEKLKEIIIQKVDEIYKVYGSSEKLFDADFVLEKSLKKNDAVVAIMKDLLDS
VKSFENYIKAFFGEGKETNRDESFYGDFVLAYDILLKVDHIYDAIRNYVTQKPYSKDKFKLYFQNPQFMGGWDKDKE
TDYRATILRYGSKYYLAIMDKKYAKCLQKIDKDDVNGNYEKINYKLLPGPNKMLPKVFFSKKWMAYYNPSEDIQKIY
KNGTFKKGDMFNLNDCHKLIDFFKDSISRYPKWSNAYDENFSETEKYKDIAGFYREVEEQGYKVSFESASKKEVDKL
VEEGKLYMFQIYNKDFSDKSHGTPNLHTMYFKLLFDENNHGQIRLSGGAELFMRRASLKKEELVVHPANSPIANKNP
DNPKKITTLSYDVYKDKRESEDQYLLHIPIAINKCPKNIFKINTEVRVLLKHDDNPYVIGIDRGERNLLYIVVVDGK
GNIVEQYSLNEIINNFNGIRIKTDYHSLLDKKEKERFEARQNWTSIENIKELKAGYISQVVHKICELVEKYDAVIAL
EDLNSGFKNSRVKVEKQVYQKFEKMLIDKLNYMVDKKSNPCATGGALKGYQITNKFESFKSMSTQNGFIFYIPAWLT
SKIDPSTGFVNLLKTKYTSIADSKKFISSFDRIMYVPEEDLFEFALDYKNFSRTDADYIKKWKLYSYGNRIRIFRNP
KKNNVEDWEEVCLTSAYKELENKYGINYQQGDIRALLCEQSDKAFYSSFMALMSLMLQMRNSITGRTDVDFLISPVK
NSDGIFYDSRNYEAQENAILPKNADANGAYNIARKVLWAIGQFKKAEDEKLDKVKIAISNKEWLEYAQTSVKH
APAPAPAPAPAPAPAPAPAPAPAPAMVSKGEELFTGVVPILVELDGDVNGHKFSVSGEGEGDATYGKLTLKFICTTG
KLPVPWPTLVTTVTYGVQCFSRYPDHMKQHDFFKSAMPEGYVQERTIFFKDDGNYKTRAEVKFEGDTLVNRIELKGI
DFKEDGNILGHKLEYNYNSHNVYIMADKQKNGIKVNFKIRHNIEDGSVQLADHYQQNTPIGDGPVLLPDNHYLSTQS
ALSKDPNEKRDHMVLLEFVTAAGITLGMDELYK
SEQ ID NO: 259
MSKLEKFTNCYSLSKTLRFKAIPVGKTQENIDNKRLLVEDEKRAEDYKGVKKLLDRYYLSFINDVLHSIKLKNLNNY
ISLFRKKTRTEKENKELENLEINLRKEIAKAFKGNEGYKSLFKKDIIETILPEFLDDKDEIALVNSENGETTAFTGE
FDNRENMESEEAKSTSIAFRCINENLTRYISNMDIFEKVDAIFDKHEVQEIKEKILNSDYDVEDFFEGEFFNEVLIQ
EGIDVYNAIIGGFVTESGEKIKGLNEYINLYNQKTKQKLPKFKPLYKQVLSDRESLSFYGEGYTSDEEVLEVERNTL
NKNSEIFSSIKKLEKLFKNFDEYSSAGIFVKNGPAISTISKDIFGEWNVIRDKWNAEYDDIHLKKKAVVTEKYEDDR
RKSFKKIGSFSLEQLQEYADADLSVVEKLKEIIIQKVDEIYKVYGSSEKLFDADFVLEKSLKKNDAVVAIMKDLLDS
VKSFENYIKAFFGEGKETNRDESFYGDFVLAYDILLKVDHIYDAIRNYVTQKPYSKDKFKLYFQNPQFMGGWDKDKE
TDYRATILRYGSKYYLAIMDKKYAKCLQKIDKDDVNGNYEKINYKLLPGPNKMLPKVFFSKKWMAYYNPSEDIQKIY
KNGTFKKGDMFNLNDCHKLIDFFKDSISRYPKWSNAYDENFSETEKYKDIAGFYREVEEQGYKVSFESASKKEVDKL
VEEGKLYMFQIYNKDFSDKSHGTPNLHTMYFKLLFDENNHGQIRLSGGAELFMRRASLKKEELVVHPANSPIANKNP
DNPKKITTLSYDVYKDKRESEDQYLLHIPIAINKCPKNIFKINTEVRVLLKHDDNPYVIGIDRGERNLLYIVVVDGK
GNIVEQYSLNEIINNFNGIRIKTDYHSLLDKKEKERFEARQNWTSIENIKELKAGYISQVVHKICELVEKYDAVIAL
EDLNSGFKNSRVKVEKQVYQKFEKMLIDKLNYMVDKKSNPCATGGALKGYQITNKFESFKSMSTQNGFIFYIPAWLT
SKIDPSTGFVNLLKTKYTSIADSKKFISSFDRIMYVPEEDLFEFALDYKNFSRTDADYIKKWKLYSYGNRIRIFRNP
KKNNVEDWEEVCLTSAYKELENKYGINYQQGDIRALLCEQSDKAFYSSFMALMSLMLQMRNSITGRTDVDFLISPVK
NSDGIFYDSRNYEAQENAILPKNADANGAYNIARKVLWAIGQFKKAEDEKLDKVKIAISNKEWLEYAQTSVKH
APAPAPAPAPAPAPAPAPAPAPAPAPAMVSKGEELFTGVVPILVELDGDVNGHKFSVSGEGEGDATYGKLTLKFICT
TGKLPVPWPTLVTTVTYGVQCFSRYPDHMKQHDFFKSAMPEGYVQERTIFFKDDGNYKTRAEVKFEGDTLVNRIELK
GIDFKEDGNILGHKLEYNYNSHNVYIMADKQKNGIKVNFKIRHNIEDGSVQLADHYQQNTPIGDGPVLLPDNHYLST
QSALSKDPNEKRDHMVLLEFVTAAGITLGMDELYK
SEQ ID NO: 260
MSKLEKFTNCYSLSKTLRFKAIPVGKTQENIDNKRLLVEDEKRAEDYKGVKKLLDRYYLSFINDVLHSIKLKNLNNY
ISLFRKKTRTEKENKELENLEINLRKEIAKAFKGNEGYKSLFKKDIIETILPEFLDDKDEIALVNSENGETTAFTGE
FDNRENMESEEAKSTSIAFRCINENLTRYISNMDIFEKVDAIFDKHEVQEIKEKILNSDYDVEDFFEGEFFNEVLIQ
EGIDVYNAIIGGFVTESGEKIKGLNEYINLYNQKTKQKLPKFKPLYKQVLSDRESLSFYGEGYTSDEEVLEVERNTL
NKNSEIFSSIKKLEKLFKNFDEYSSAGIFVKNGPAISTISKDIFGEWNVIRDKWNAEYDDIHLKKKAVVTEKYEDDR
RKSFKKIGSFSLEQLQEYADADLSVVEKLKEIIIQKVDEIYKVYGSSEKLFDADFVLEKSLKKNDAVVAIMKDLLDS
VKSFENYIKAFFGEGKETNRDESFYGDFVLAYDILLKVDHIYDAIRNYVTQKPYSKDKFKLYFQNPQFMGGWDKDKE
TDYRATILRYGSKYYLAIMDKKYAKCLQKIDKDDVNGNYEKINYKLLPGPNKMLPKVFFSKKWMAYYNPSEDIQKIY
KNGTFKKGDMFNLNDCHKLIDFFKDSISRYPKWSNAYDENFSETEKYKDIAGFYREVEEQGYKVSFESASKKEVDKL
VEEGKLYMFQIYNKDFSDKSHGTPNLHTMYFKLLFDENNHGQIRLSGGAELFMRRASLKKEELVVHPANSPIANKNP
DNPKKITTLSYDVYKDKRESEDQYLLHIPIAINKCPKNIFKINTEVRVLLKHDDNPYVIGIDRGERNLLYIVVVDGK
GNIVEQYSLNEIINNFNGIRIKTDYHSLLDKKEKERFEARQNWTSIENIKELKAGYISQVVHKICELVEKYDAVIAL
EDLNSGFKNSRVKVEKQVYQKFEKMLIDKLNYMVDKKSNPCATGGALKGYQITNKFESFKSMSTQNGFIFYIPAWLT
SKIDPSTGFVNLLKTKYTSIADSKKFISSFDRIMYVPEEDLFEFALDYKNFSRTDADYIKKWKLYSYGNRIRIFRNP
KKNNVEDWEEVCLTSAYKELENKYGINYQQGDIRALLCEQSDKAFYSSFMALMSLMLQMRNSITGRTDVDFLISPVK
NSDGIFYDSRNYEAQENAILPKNADANGAYNIARKVLWAIGQFKKAEDEKLDKVKIAISNKEWLEYAQTSVKH
APAPAPAPAPAPAPAPAPAPAPAPAPAPAMVSKGEELFTGVVPILVELDGDVNGHKFSVSGEGEGDATYGKLTLKFI
CTTGKLPVPWPTLVTTVTYGVQCFSRYPDHMKQHDFFKSAMPEGYVQERTIFFKDDGNYKTRAEVKFEGDTLVNRIE
LKGIDFKEDGNILGHKLEYNYNSHNVYIMADKQKNGIKVNFKIRHNIEDGSVQLADHYQQNTPIGDGPVLLPDNHYL
STQSALSKDPNEKRDHMVLLEFVTAAGITLGMDELYK
SEQ ID NO: 261
MSKLEKFTNCYSLSKTLRFKAIPVGKTQENIDNKRLLVEDEKRAEDYKGVKKLLDRYYLSFINDVLHSIKLKNLNNY
ISLFRKKTRTEKENKELENLEINLRKEIAKAFKGNEGYKSLFKKDIIETILPEFLDDKDEIALVNSENGETTAFTGE
FDNRENMESEEAKSTSIAFRCINENLTRYISNMDIFEKVDAIFDKHEVQEIKEKILNSDYDVEDFFEGEFFNEVLIQ
EGIDVYNAIIGGFVTESGEKIKGLNEYINLYNQKTKQKLPKFKPLYKQVLSDRESLSFYGEGYTSDEEVLEVERNTL
NKNSEIFSSIKKLEKLFKNFDEYSSAGIFVKNGPAISTISKDIFGEWNVIRDKWNAEYDDIHLKKKAVVTEKYEDDR
RKSFKKIGSFSLEQLQEYADADLSVVEKLKEIIIQKVDEIYKVYGSSEKLFDADFVLEKSLKKNDAVVAIMKDLLDS
VKSFENYIKAFFGEGKETNRDESFYGDFVLAYDILLKVDHIYDAIRNYVTQKPYSKDKFKLYFQNPQFMGGWDKDKE
TDYRATILRYGSKYYLAIMDKKYAKCLQKIDKDDVNGNYEKINYKLLPGPNKMLPKVFFSKKWMAYYNPSEDIQKIY
KNGTFKKGDMFNLNDCHKLIDFFKDSISRYPKWSNAYDENFSETEKYKDIAGFYREVEEQGYKVSFESASKKEVDKL
VEEGKLYMFQIYNKDFSDKSHGTPNLHTMYFKLLFDENNHGQIRLSGGAELFMRRASLKKEELVVHPANSPIANKNP
DNPKKITTLSYDVYKDKRESEDQYLLHIPIAINKCPKNIFKINTEVRVLLKHDDNPYVIGIDRGERNLLYIVVVDGK
GNIVEQYSLNEIINNFNGIRIKTDYHSLLDKKEKERFEARQNWTSIENIKELKAGYISQVVHKICELVEKYDAVIAL
EDLNSGFKNSRVKVEKQVYQKFEKMLIDKLNYMVDKKSNPCATGGALKGYQITNKFESFKSMSTQNGFIFYIPAWLT
SKIDPSTGFVNLLKTKYTSIADSKKFISSFDRIMYVPEEDLFEFALDYKNFSRTDADYIKKWKLYSYGNRIRIFRNP
KKNNVEDWEEVCLTSAYKELENKYGINYQQGDIRALLCEQSDKAFYSSFMALMSLMLQMRNSITGRTDVDFLISPVK
NSDGIFYDSRNYEAQENAILPKNADANGAYNIARKVLWAIGQFKKAEDEKLDKVKIAISNKEWLEYAQTSVKH
XPMVSKGEELFTGVVPILVELDGDVNGHKFSVSGEGEGDATYGKLTLKFICTTGKLPVPWPTLVTTVTYGVQCFSRY
PDHMKQHDFFKSAMPEGYVQERTIFFKDDGNYKTRAEVKFEGDTLVNRIELKGIDFKEDGNILGHKLEYNYNSHNVY
IMADKQKNGIKVNFKIRHNIEDGSVQLADHYQQNTPIGDGPVLLPDNHYLSTQSALSKDPNEKRDHMVLLEFVTAAG
ITLGMDELYK
SEQ ID NO: 262
MSKLEKFTNCYSLSKTLRFKAIPVGKTQENIDNKRLLVEDEKRAEDYKGVKKLLDRYYLSFINDVLHSIKLKNLNNY
ISLFRKKTRTEKENKELENLEINLRKEIAKAFKGNEGYKSLFKKDIIETILPEFLDDKDEIALVNSENGETTAFTGE
FDNRENMESEEAKSTSIAFRCINENLTRYISNMDIFEKVDAIFDKHEVQEIKEKILNSDYDVEDFFEGEFFNEVLIQ
EGIDVYNAIIGGFVTESGEKIKGLNEYINLYNQKTKQKLPKFKPLYKQVLSDRESLSFYGEGYTSDEEVLEVERNTL
NKNSEIFSSIKKLEKLFKNFDEYSSAGIFVKNGPAISTISKDIFGEWNVIRDKWNAEYDDIHLKKKAVVTEKYEDDR
RKSFKKIGSFSLEQLQEYADADLSVVEKLKEIIIQKVDEIYKVYGSSEKLFDADFVLEKSLKKNDAVVAIMKDLLDS
VKSFENYIKAFFGEGKETNRDESFYGDFVLAYDILLKVDHIYDAIRNYVTQKPYSKDKFKLYFQNPQFMGGWDKDKE
TDYRATILRYGSKYYLAIMDKKYAKCLQKIDKDDVNGNYEKINYKLLPGPNKMLPKVFFSKKWMAYYNPSEDIQKIY
KNGTFKKGDMFNLNDCHKLIDFFKDSISRYPKWSNAYDENFSETEKYKDIAGFYREVEEQGYKVSFESASKKEVDKL
VEEGKLYMFQIYNKDFSDKSHGTPNLHTMYFKLLFDENNHGQIRLSGGAELFMRRASLKKEELVVHPANSPIANKNP
DNPKKITTLSYDVYKDKRESEDQYLLHIPIAINKCPKNIFKINTEVRVLLKHDDNPYVIGIDRGERNLLYIVVVDGK
GNIVEQYSLNEIINNFNGIRIKTDYHSLLDKKEKERFEARQNWTSIENIKELKAGYISQVVHKICELVEKYDAVIAL
EDLNSGFKNSRVKVEKQVYQKFEKMLIDKLNYMVDKKSNPCATGGALKGYQITNKFESFKSMSTQNGFIFYIPAWLT
SKIDPSTGFVNLLKTKYTSIADSKKFISSFDRIMYVPEEDLFEFALDYKNFSRTDADYIKKWKLYSYGNRIRIFRNP
KKNNVEDWEEVCLTSAYKELENKYGINYQQGDIRALLCEQSDKAFYSSFMALMSLMLQMRNSITGRTDVDFLISPVK
NSDGIFYDSRNYEAQENAILPKNADANGAYNIARKVLWAIGQFKKAEDEKLDKVKIAISNKEWLEYAQTSVKH
XPXPMVSKGEELFTGVVPILVELDGDVNGHKFSVSGEGEGDATYGKLTLKFICTTGKLPVPWPTLVTTVTYGVQCFS
RYPDHMKQHDFFKSAMPEGYVQERTIFFKDDGNYKTRAEVKFEGDTLVNRIELKGIDFKEDGNILGHKLEYNYNSHN
VYIMADKQKNGIKVNFKIRHNIEDGSVQLADHYQQNTPIGDGPVLLPDNHYLSTQSALSKDPNEKRDHMVLLEFVTA
AGITLGMDELYK
SEQ ID NO: 263
MSKLEKFTNCYSLSKTLRFKAIPVGKTQENIDNKRLLVEDEKRAEDYKGVKKLLDRYYLSFINDVLHSIKLKNLNNY
ISLFRKKTRTEKENKELENLEINLRKEIAKAFKGNEGYKSLFKKDIIETILPEFLDDKDEIALVNSENGETTAFTGE
FDNRENMESEEAKSTSIAFRCINENLTRYISNMDIFEKVDAIFDKHEVQEIKEKILNSDYDVEDFFEGEFFNEVLIQ
EGIDVYNAIIGGFVTESGEKIKGLNEYINLYNQKTKQKLPKFKPLYKQVLSDRESLSFYGEGYTSDEEVLEVERNTL
NKNSEIFSSIKKLEKLFKNFDEYSSAGIFVKNGPAISTISKDIFGEWNVIRDKWNAEYDDIHLKKKAVVTEKYEDDR
RKSFKKIGSFSLEQLQEYADADLSVVEKLKEIIIQKVDEIYKVYGSSEKLFDADFVLEKSLKKNDAVVAIMKDLLDS
VKSFENYIKAFFGEGKETNRDESFYGDFVLAYDILLKVDHIYDAIRNYVTQKPYSKDKFKLYFQNPQFMGGWDKDKE
TDYRATILRYGSKYYLAIMDKKYAKCLQKIDKDDVNGNYEKINYKLLPGPNKMLPKVFFSKKWMAYYNPSEDIQKIY
KNGTFKKGDMFNLNDCHKLIDFFKDSISRYPKWSNAYDENFSETEKYKDIAGFYREVEEQGYKVSFESASKKEVDKL
VEEGKLYMFQIYNKDFSDKSHGTPNLHTMYFKLLFDENNHGQIRLSGGAELFMRRASLKKEELVVHPANSPIANKNP
DNPKKITTLSYDVYKDKRESEDQYLLHIPIAINKCPKNIFKINTEVRVLLKHDDNPYVIGIDRGERNLLYIVVVDGK
GNIVEQYSLNEIINNFNGIRIKTDYHSLLDKKEKERFEARQNWTSIENIKELKAGYISQVVHKICELVEKYDAVIAL
EDLNSGFKNSRVKVEKQVYQKFEKMLIDKLNYMVDKKSNPCATGGALKGYQITNKFESFKSMSTQNGFIFYIPAWLT
SKIDPSTGFVNLLKTKYTSIADSKKFISSFDRIMYVPEEDLFEFALDYKNFSRTDADYIKKWKLYSYGNRIRIFRNP
KKNNVEDWEEVCLTSAYKELENKYGINYQQGDIRALLCEQSDKAFYSSFMALMSLMLQMRNSITGRTDVDFLISPVK
NSDGIFYDSRNYEAQENAILPKNADANGAYNIARKVLWAIGQFKKAEDEKLDKVKIAISNKEWLEYAQTSVKH
XPXPXMVSKGEELFTGVVPILVELDGDVNGHKFSVSGEGEGDATYGKLTLKFICTTGKLPVPWPTLVTTVTYGVQCF
SRYPDHMKQHDFFKSAMPEGYVQERTIFFKDDGNYKTRAEVKFEGDTLVNRIELKGIDFKEDGNILGHKLEYNYNSH
NVYIMADKQKNGIKVNFKIRHNIEDGSVQLADHYQQNTPIGDGPVLLPDNHYLSTQSALSKDPNEKRDHMVLLEFVT
AAGITLGMDELYK
SEQ ID NO: 264
MSKLEKFTNCYSLSKTLRFKAIPVGKTQENIDNKRLLVEDEKRAEDYKGVKKLLDRYYLSFINDVLHSIKLKNLNNY
ISLFRKKTRTEKENKELENLEINLRKEIAKAFKGNEGYKSLFKKDIIETILPEFLDDKDEIALVNSENGETTAFTGE
FDNRENMESEEAKSTSIAFRCINENLTRYISNMDIFEKVDAIFDKHEVQEIKEKILNSDYDVEDFFEGEFFNEVLIQ
EGIDVYNAIIGGFVTESGEKIKGLNEYINLYNQKTKQKLPKFKPLYKQVLSDRESLSFYGEGYTSDEEVLEVERNTL
NKNSEIFSSIKKLEKLFKNFDEYSSAGIFVKNGPAISTISKDIFGEWNVIRDKWNAEYDDIHLKKKAVVTEKYEDDR
RKSFKKIGSFSLEQLQEYADADLSVVEKLKEIIIQKVDEIYKVYGSSEKLFDADFVLEKSLKKNDAVVAIMKDLLDS
VKSFENYIKAFFGEGKETNRDESFYGDFVLAYDILLKVDHIYDAIRNYVTQKPYSKDKFKLYFQNPQFMGGWDKDKE
TDYRATILRYGSKYYLAIMDKKYAKCLQKIDKDDVNGNYEKINYKLLPGPNKMLPKVFFSKKWMAYYNPSEDIQKIY
KNGTFKKGDMFNLNDCHKLIDFFKDSISRYPKWSNAYDENFSETEKYKDIAGFYREVEEQGYKVSFESASKKEVDKL
VEEGKLYMFQIYNKDFSDKSHGTPNLHTMYFKLLFDENNHGQIRLSGGAELFMRRASLKKEELVVHPANSPIANKNP
DNPKKITTLSYDVYKDKRESEDQYLLHIPIAINKCPKNIFKINTEVRVLLKHDDNPYVIGIDRGERNLLYIVVVDGK
GNIVEQYSLNEIINNFNGIRIKTDYHSLLDKKEKERFEARQNWTSIENIKELKAGYISQVVHKICELVEKYDAVIAL
EDLNSGFKNSRVKVEKQVYQKFEKMLIDKLNYMVDKKSNPCATGGALKGYQITNKFESFKSMSTQNGFIFYIPAWLT
SKIDPSTGFVNLLKTKYTSIADSKKFISSFDRIMYVPEEDLFEFALDYKNFSRTDADYIKKWKLYSYGNRIRIFRNP
KKNNVEDWEEVCLTSAYKELENKYGINYQQGDIRALLCEQSDKAFYSSFMALMSLMLQMRNSITGRTDVDFLISPVK
NSDGIFYDSRNYEAQENAILPKNADANGAYNIARKVLWAIGQFKKAEDEKLDKVKIAISNKEWLEYAQTSVKH
XPXPXPXPMVSKGEELFTGVVPILVELDGDVNGHKFSVSGEGEGDATYGKLTLKFICTTGKLPVPWPTLVTTVTYGV
QCFSRYPDHMKQHDFFKSAMPEGYVQERTIFFKDDGNYKTRAEVKFEGDTLVNRIELKGIDFKEDGNILGHKLEYNY
NSHNVYIMADKQKNGIKVNFKIRHNIEDGSVQLADHYQQNTPIGDGPVLLPDNHYLSTQSALSKDPNEKRDHMVLLE
FVTAAGITLGMDELYK
SEQ ID NO: 265
MSKLEKFTNCYSLSKTLRFKAIPVGKTQENIDNKRLLVEDEKRAEDYKGVKKLLDRYYLSFINDVLHSIKLKNLNNY
ISLFRKKTRTEKENKELENLEINLRKEIAKAFKGNEGYKSLFKKDIIETILPEFLDDKDEIALVNSENGETTAFTGE
FDNRENMESEEAKSTSIAFRCINENLTRYISNMDIFEKVDAIFDKHEVQEIKEKILNSDYDVEDFFEGEFFNEVLIQ
EGIDVYNAIIGGFVTESGEKIKGLNEYINLYNQKTKQKLPKFKPLYKQVLSDRESLSFYGEGYTSDEEVLEVERNTL
NKNSEIFSSIKKLEKLFKNFDEYSSAGIFVKNGPAISTISKDIFGEWNVIRDKWNAEYDDIHLKKKAVVTEKYEDDR
RKSFKKIGSFSLEQLQEYADADLSVVEKLKEIIIQKVDEIYKVYGSSEKLFDADFVLEKSLKKNDAVVAIMKDLLDS
VKSFENYIKAFFGEGKETNRDESFYGDFVLAYDILLKVDHIYDAIRNYVTQKPYSKDKFKLYFQNPQFMGGWDKDKE
TDYRATILRYGSKYYLAIMDKKYAKCLQKIDKDDVNGNYEKINYKLLPGPNKMLPKVFFSKKWMAYYNPSEDIQKIY
KNGTFKKGDMFNLNDCHKLIDFFKDSISRYPKWSNAYDENFSETEKYKDIAGFYREVEEQGYKVSFESASKKEVDKL
VEEGKLYMFQIYNKDFSDKSHGTPNLHTMYFKLLFDENNHGQIRLSGGAELFMRRASLKKEELVVHPANSPIANKNP
DNPKKITTLSYDVYKDKRESEDQYLLHIPIAINKCPKNIFKINTEVRVLLKHDDNPYVIGIDRGERNLLYIVVVDGK
GNIVEQYSLNEIINNFNGIRIKTDYHSLLDKKEKERFEARQNWTSIENIKELKAGYISQVVHKICELVEKYDAVIAL
EDLNSGFKNSRVKVEKQVYQKFEKMLIDKLNYMVDKKSNPCATGGALKGYQITNKFESFKSMSTQNGFIFYIPAWLT
SKIDPSTGFVNLLKTKYTSIADSKKFISSFDRIMYVPEEDLFEFALDYKNFSRTDADYIKKWKLYSYGNRIRIFRNP
KKNNVEDWEEVCLTSAYKELENKYGINYQQGDIRALLCEQSDKAFYSSFMALMSLMLQMRNSITGRTDVDFLISPVK
NSDGIFYDSRNYEAQENAILPKNADANGAYNIARKVLWAIGQFKKAEDEKLDKVKIAISNKEWLEYAQTSVKH
XPXPXPXPXPMVSKGEELFTGVVPILVELDGDVNGHKFSVSGEGEGDATYGKLTLKFICTTGKLPVPWPTLVTTVTY
GVQCFSRYPDHMKQHDFFKSAMPEGYVQERTIFFKDDGNYKTRAEVKFEGDTLVNRIELKGIDFKEDGNILGHKLEY
NYNSHNVYIMADKQKNGIKVNFKIRHNIEDGSVQLADHYQQNTPIGDGPVLLPDNHYLSTQSALSKDPNEKRDHMVL
LEFVTAAGITLGMDELYK
SEQ ID NO: 266
MSKLEKFTNCYSLSKTLRFKAIPVGKTQENIDNKRLLVEDEKRAEDYKGVKKLLDRYYLSFINDVLHSIKLKNLNNY
ISLFRKKTRTEKENKELENLEINLRKEIAKAFKGNEGYKSLFKKDIIETILPEFLDDKDEIALVNSENGETTAFTGE
FDNRENMESEEAKSTSIAFRCINENLTRYISNMDIFEKVDAIFDKHEVQEIKEKILNSDYDVEDFFEGEFFNEVLIQ
EGIDVYNAIIGGFVTESGEKIKGLNEYINLYNQKTKQKLPKFKPLYKQVLSDRESLSFYGEGYTSDEEVLEVERNTL
NKNSEIFSSIKKLEKLFKNFDEYSSAGIFVKNGPAISTISKDIFGEWNVIRDKWNAEYDDIHLKKKAVVTEKYEDDR
RKSFKKIGSFSLEQLQEYADADLSVVEKLKEIIIQKVDEIYKVYGSSEKLFDADFVLEKSLKKNDAVVAIMKDLLDS
VKSFENYIKAFFGEGKETNRDESFYGDFVLAYDILLKVDHIYDAIRNYVTQKPYSKDKFKLYFQNPQFMGGWDKDKE
TDYRATILRYGSKYYLAIMDKKYAKCLQKIDKDDVNGNYEKINYKLLPGPNKMLPKVFFSKKWMAYYNPSEDIQKIY
KNGTFKKGDMFNLNDCHKLIDFFKDSISRYPKWSNAYDENFSETEKYKDIAGFYREVEEQGYKVSFESASKKEVDKL
VEEGKLYMFQIYNKDFSDKSHGTPNLHTMYFKLLFDENNHGQIRLSGGAELFMRRASLKKEELVVHPANSPIANKNP
DNPKKITTLSYDVYKDKRESEDQYLLHIPIAINKCPKNIFKINTEVRVLLKHDDNPYVIGIDRGERNLLYIVVVDGK
GNIVEQYSLNEIINNFNGIRIKTDYHSLLDKKEKERFEARQNWTSIENIKELKAGYISQVVHKICELVEKYDAVIAL
EDLNSGFKNSRVKVEKQVYQKFEKMLIDKLNYMVDKKSNPCATGGALKGYQITNKFESFKSMSTQNGFIFYIPAWLT
SKIDPSTGFVNLLKTKYTSIADSKKFISSFDRIMYVPEEDLFEFALDYKNFSRTDADYIKKWKLYSYGNRIRIFRNP
KKNNVEDWEEVCLTSAYKELENKYGINYQQGDIRALLCEQSDKAFYSSFMALMSLMLQMRNSITGRTDVDFLISPVK
NSDGIFYDSRNYEAQENAILPKNADANGAYNIARKVLWAIGQFKKAEDEKLDKVKIAISNKEWLEYAQTSVKH
XPXPXPXPXPXPMVSKGEELFTGVVPILVELDGDVNGHKFSVSGEGEGDATYGKLTLKFICTTGKLPVPWPTLVTTV
TYGVQCFSRYPDHMKQHDFFKSAMPEGYVQERTIFFKDDGNYKTRAEVKFEGDTLVNRIELKGIDFKEDGNILGHKL
EYNYNSHNVYIMADKQKNGIKVNFKIRHNIEDGSVQLADHYQQNTPIGDGPVLLPDNHYLSTQSALSKDPNEKRDHM
VLLEFVTAAGITLGMDELYK
SEQ ID NO: 267
MSKLEKFTNCYSLSKTLRFKAIPVGKTQENIDNKRLLVEDEKRAEDYKGVKKLLDRYYLSFINDVLHSIKLKNLNNY
ISLFRKKTRTEKENKELENLEINLRKEIAKAFKGNEGYKSLFKKDIIETILPEFLDDKDEIALVNSENGETTAFTGE
FDNRENMESEEAKSTSIAFRCINENLTRYISNMDIFEKVDAIFDKHEVQEIKEKILNSDYDVEDFFEGEFFNEVLIQ
EGIDVYNAIIGGFVTESGEKIKGLNEYINLYNQKTKQKLPKFKPLYKQVLSDRESLSFYGEGYTSDEEVLEVERNTL
NKNSEIFSSIKKLEKLFKNFDEYSSAGIFVKNGPAISTISKDIFGEWNVIRDKWNAEYDDIHLKKKAVVTEKYEDDR
RKSFKKIGSFSLEQLQEYADADLSVVEKLKEIIIQKVDEIYKVYGSSEKLFDADFVLEKSLKKNDAVVAIMKDLLDS
VKSFENYIKAFFGEGKETNRDESFYGDFVLAYDILLKVDHIYDAIRNYVTQKPYSKDKFKLYFQNPQFMGGWDKDKE
TDYRATILRYGSKYYLAIMDKKYAKCLQKIDKDDVNGNYEKINYKLLPGPNKMLPKVFFSKKWMAYYNPSEDIQKIY
KNGTFKKGDMFNLNDCHKLIDFFKDSISRYPKWSNAYDENFSETEKYKDIAGFYREVEEQGYKVSFESASKKEVDKL
VEEGKLYMFQIYNKDFSDKSHGTPNLHTMYFKLLFDENNHGQIRLSGGAELFMRRASLKKEELVVHPANSPIANKNP
DNPKKITTLSYDVYKDKRESEDQYLLHIPIAINKCPKNIFKINTEVRVLLKHDDNPYVIGIDRGERNLLYIVVVDGK
GNIVEQYSLNEIINNFNGIRIKTDYHSLLDKKEKERFEARQNWTSIENIKELKAGYISQVVHKICELVEKYDAVIAL
EDLNSGFKNSRVKVEKQVYQKFEKMLIDKLNYMVDKKSNPCATGGALKGYQITNKFESFKSMSTQNGFIFYIPAWLT
SKIDPSTGFVNLLKTKYTSIADSKKFISSFDRIMYVPEEDLFEFALDYKNFSRTDADYIKKWKLYSYGNRIRIFRNP
KKNNVEDWEEVCLTSAYKELENKYGINYQQGDIRALLCEQSDKAFYSSFMALMSLMLQMRNSITGRTDVDFLISPVK
NSDGIFYDSRNYEAQENAILPKNADANGAYNIARKVLWAIGQFKKAEDEKLDKVKIAISNKEWLEYAQTSVKH
XPXPXPXPXPXPXPMVSKGEELFTGVVPILVELDGDVNGHKFSVSGEGEGDATYGKLTLKFICTTGKLPVPWPTLVT
TVTYGVQCFSRYPDHMKQHDFFKSAMPEGYVQERTIFFKDDGNYKTRAEVKFEGDTLVNRIELKGIDFKEDGNILGH
KLEYNYNSHNVYIMADKQKNGIKVNFKIRHNIEDGSVQLADHYQQNTPIGDGPVLLPDNHYLSTQSALSKDPNEKRD
HMVLLEFVTAAGITLGMDELYK
SEQ ID NO: 268
MSKLEKFTNCYSLSKTLRFKAIPVGKTQENIDNKRLLVEDEKRAEDYKGVKKLLDRYYLSFINDVLHSIKLKNLNNY
ISLFRKKTRTEKENKELENLEINLRKEIAKAFKGNEGYKSLFKKDIIETILPEFLDDKDEIALVNSENGETTAFTGE
FDNRENMESEEAKSTSIAFRCINENLTRYISNMDIFEKVDAIFDKHEVQEIKEKILNSDYDVEDFFEGEFFNEVLIQ
EGIDVYNAIIGGFVTESGEKIKGLNEYINLYNQKTKQKLPKFKPLYKQVLSDRESLSFYGEGYTSDEEVLEVERNTL
NKNSEIFSSIKKLEKLFKNFDEYSSAGIFVKNGPAISTISKDIFGEWNVIRDKWNAEYDDIHLKKKAVVTEKYEDDR
RKSFKKIGSFSLEQLQEYADADLSVVEKLKEIIIQKVDEIYKVYGSSEKLFDADFVLEKSLKKNDAVVAIMKDLLDS
VKSFENYIKAFFGEGKETNRDESFYGDFVLAYDILLKVDHIYDAIRNYVTQKPYSKDKFKLYFQNPQFMGGWDKDKE
TDYRATILRYGSKYYLAIMDKKYAKCLQKIDKDDVNGNYEKINYKLLPGPNKMLPKVFFSKKWMAYYNPSEDIQKIY
KNGTFKKGDMFNLNDCHKLIDFFKDSISRYPKWSNAYDENFSETEKYKDIAGFYREVEEQGYKVSFESASKKEVDKL
VEEGKLYMFQIYNKDFSDKSHGTPNLHTMYFKLLFDENNHGQIRLSGGAELFMRRASLKKEELVVHPANSPIANKNP
DNPKKITTLSYDVYKDKRESEDQYLLHIPIAINKCPKNIFKINTEVRVLLKHDDNPYVIGIDRGERNLLYIVVVDGK
GNIVEQYSLNEIINNFNGIRIKTDYHSLLDKKEKERFEARQNWTSIENIKELKAGYISQVVHKICELVEKYDAVIAL
EDLNSGFKNSRVKVEKQVYQKFEKMLIDKLNYMVDKKSNPCATGGALKGYQITNKFESFKSMSTQNGFIFYIPAWLT
SKIDPSTGFVNLLKTKYTSIADSKKFISSFDRIMYVPEEDLFEFALDYKNFSRTDADYIKKWKLYSYGNRIRIFRNP
KKNNVEDWEEVCLTSAYKELENKYGINYQQGDIRALLCEQSDKAFYSSFMALMSLMLQMRNSITGRTDVDFLISPVK
NSDGIFYDSRNYEAQENAILPKNADANGAYNIARKVLWAIGQFKKAEDEKLDKVKIAISNKEWLEYAQTSVKH
XPXPXPXPXPXPXPXPMVSKGEELFTGVVPILVELDGDVNGHKFSVSGEGEGDATYGKLTLKFICTTGKLPVPWPTL
VTTVTYGVQCFSRYPDHMKQHDFFKSAMPEGYVQERTIFFKDDGNYKTRAEVKFEGDTLVNRIELKGIDFKEDGNIL
GHKLEYNYNSHNVYIMADKQKNGIKVNFKIRHNIEDGSVQLADHYQQNTPIGDGPVLLPDNHYLSTQSALSKDPNEK
RDHMVLLEFVTAAGITLGMDELYK
SEQ ID NO: 269
MSKLEKFTNCYSLSKTLRFKAIPVGKTQENIDNKRLLVEDEKRAEDYKGVKKLLDRYYLSFINDVLHSIKLKNLNNY
ISLFRKKTRTEKENKELENLEINLRKEIAKAFKGNEGYKSLFKKDIIETILPEFLDDKDEIALVNSENGETTAFTGE
FDNRENMESEEAKSTSIAFRCINENLTRYISNMDIFEKVDAIFDKHEVQEIKEKILNSDYDVEDFFEGEFFNEVLIQ
EGIDVYNAIIGGFVTESGEKIKGLNEYINLYNQKTKQKLPKFKPLYKQVLSDRESLSFYGEGYTSDEEVLEVERNTL
NKNSEIFSSIKKLEKLFKNFDEYSSAGIFVKNGPAISTISKDIFGEWNVIRDKWNAEYDDIHLKKKAVVTEKYEDDR
RKSFKKIGSFSLEQLQEYADADLSVVEKLKEIIIQKVDEIYKVYGSSEKLFDADFVLEKSLKKNDAVVAIMKDLLDS
VKSFENYIKAFFGEGKETNRDESFYGDFVLAYDILLKVDHIYDAIRNYVTQKPYSKDKFKLYFQNPQFMGGWDKDKE
TDYRATILRYGSKYYLAIMDKKYAKCLQKIDKDDVNGNYEKINYKLLPGPNKMLPKVFFSKKWMAYYNPSEDIQKIY
KNGTFKKGDMFNLNDCHKLIDFFKDSISRYPKWSNAYDENFSETEKYKDIAGFYREVEEQGYKVSFESASKKEVDKL
VEEGKLYMFQIYNKDFSDKSHGTPNLHTMYFKLLFDENNHGQIRLSGGAELFMRRASLKKEELVVHPANSPIANKNP
DNPKKITTLSYDVYKDKRESEDQYLLHIPIAINKCPKNIFKINTEVRVLLKHDDNPYVIGIDRGERNLLYIVVVDGK
GNIVEQYSLNEIINNFNGIRIKTDYHSLLDKKEKERFEARQNWTSIENIKELKAGYISQVVHKICELVEKYDAVIAL
EDLNSGFKNSRVKVEKQVYQKFEKMLIDKLNYMVDKKSNPCATGGALKGYQITNKFESFKSMSTQNGFIFYIPAWLT
SKIDPSTGFVNLLKTKYTSIADSKKFISSFDRIMYVPEEDLFEFALDYKNFSRTDADYIKKWKLYSYGNRIRIFRNP
KKNNVEDWEEVCLTSAYKELENKYGINYQQGDIRALLCEQSDKAFYSSFMALMSLMLQMRNSITGRTDVDFLISPVK
NSDGIFYDSRNYEAQENAILPKNADANGAYNIARKVLWAIGQFKKAEDEKLDKVKIAISNKEWLEYAQTSVKH
XPXPXPXPXPXPXPXPXPMVSKGEELFTGVVPILVELDGDVNGHKFSVSGEGEGDATYGKLTLKFICTTGKLPVPWP
TLVTTVTYGVQCFSRYPDHMKQHDFFKSAMPEGYVQERTIFFKDDGNYKTRAEVKFEGDTLVNRIELKGIDFKEDGN
ILGHKLEYNYNSHNVYIMADKQKNGIKVNFKIRHNIEDGSVQLADHYQQNTPIGDGPVLLPDNHYLSTQSALSKDPN
EKRDHMVLLEFVTAAGITLGMDELYK
SEQ ID NO: 270
MSKLEKFTNCYSLSKTLRFKAIPVGKTQENIDNKRLLVEDEKRAEDYKGVKKLLDRYYLSFINDVLHSIKLKNLNNY
ISLFRKKTRTEKENKELENLEINLRKEIAKAFKGNEGYKSLFKKDIIETILPEFLDDKDEIALVNSENGETTAFTGE
FDNRENMESEEAKSTSIAFRCINENLTRYISNMDIFEKVDAIFDKHEVQEIKEKILNSDYDVEDFFEGEFFNEVLIQ
EGIDVYNAIIGGFVTESGEKIKGLNEYINLYNQKTKQKLPKFKPLYKQVLSDRESLSFYGEGYTSDEEVLEVERNTL
NKNSEIFSSIKKLEKLFKNFDEYSSAGIFVKNGPAISTISKDIFGEWNVIRDKWNAEYDDIHLKKKAVVTEKYEDDR
RKSFKKIGSFSLEQLQEYADADLSVVEKLKEIIIQKVDEIYKVYGSSEKLFDADFVLEKSLKKNDAVVAIMKDLLDS
VKSFENYIKAFFGEGKETNRDESFYGDFVLAYDILLKVDHIYDAIRNYVTQKPYSKDKFKLYFQNPQFMGGWDKDKE
TDYRATILRYGSKYYLAIMDKKYAKCLQKIDKDDVNGNYEKINYKLLPGPNKMLPKVFFSKKWMAYYNPSEDIQKIY
KNGTFKKGDMFNLNDCHKLIDFFKDSISRYPKWSNAYDENFSETEKYKDIAGFYREVEEQGYKVSFESASKKEVDKL
VEEGKLYMFQIYNKDFSDKSHGTPNLHTMYFKLLFDENNHGQIRLSGGAELFMRRASLKKEELVVHPANSPIANKNP
DNPKKITTLSYDVYKDKRESEDQYLLHIPIAINKCPKNIFKINTEVRVLLKHDDNPYVIGIDRGERNLLYIVVVDGK
GNIVEQYSLNEIINNFNGIRIKTDYHSLLDKKEKERFEARQNWTSIENIKELKAGYISQVVHKICELVEKYDAVIAL
EDLNSGFKNSRVKVEKQVYQKFEKMLIDKLNYMVDKKSNPCATGGALKGYQITNKFESFKSMSTQNGFIFYIPAWLT
SKIDPSTGFVNLLKTKYTSIADSKKFISSFDRIMYVPEEDLFEFALDYKNFSRTDADYIKKWKLYSYGNRIRIFRNP
KKNNVEDWEEVCLTSAYKELENKYGINYQQGDIRALLCEQSDKAFYSSFMALMSLMLQMRNSITGRTDVDFLISPVK
NSDGIFYDSRNYEAQENAILPKNADANGAYNIARKVLWAIGQFKKAEDEKLDKVKIAISNKEWLEYAQTSVKH
XPXPXPXPXPXPXPXPXPXPMVSKGEELFTGVVPILVELDGDVNGHKFSVSGEGEGDATYGKLTLKFICTTGKLPVP
WPTLVTTVTYGVQCFSRYPDHMKQHDFFKSAMPEGYVQERTIFFKDDGNYKTRAEVKFEGDTLVNRIELKGIDFKED
GNILGHKLEYNYNSHNVYIMADKQKNGIKVNFKIRHNIEDGSVQLADHYQQNTPIGDGPVLLPDNHYLSTQSALSKD
PNEKRDHMVLLEFVTAAGITLGMDELYK
SEQ ID NO: 271
MSKLEKFTNCYSLSKTLRFKAIPVGKTQENIDNKRLLVEDEKRAEDYKGVKKLLDRYYLSFINDVLHSIKLKNLNNY
ISLFRKKTRTEKENKELENLEINLRKEIAKAFKGNEGYKSLFKKDIIETILPEFLDDKDEIALVNSENGETTAFTGE
FDNRENMESEEAKSTSIAFRCINENLTRYISNMDIFEKVDAIFDKHEVQEIKEKILNSDYDVEDFFEGEFFNEVLIQ
EGIDVYNAIIGGFVTESGEKIKGLNEYINLYNQKTKQKLPKFKPLYKQVLSDRESLSFYGEGYTSDEEVLEVERNTL
NKNSEIFSSIKKLEKLFKNFDEYSSAGIFVKNGPAISTISKDIFGEWNVIRDKWNAEYDDIHLKKKAVVTEKYEDDR
RKSFKKIGSFSLEQLQEYADADLSVVEKLKEIIIQKVDEIYKVYGSSEKLFDADFVLEKSLKKNDAVVAIMKDLLDS
VKSFENYIKAFFGEGKETNRDESFYGDFVLAYDILLKVDHIYDAIRNYVTQKPYSKDKFKLYFQNPQFMGGWDKDKE
TDYRATILRYGSKYYLAIMDKKYAKCLQKIDKDDVNGNYEKINYKLLPGPNKMLPKVFFSKKWMAYYNPSEDIQKIY
KNGTFKKGDMFNLNDCHKLIDFFKDSISRYPKWSNAYDENFSETEKYKDIAGFYREVEEQGYKVSFESASKKEVDKL
VEEGKLYMFQIYNKDFSDKSHGTPNLHTMYFKLLFDENNHGQIRLSGGAELFMRRASLKKEELVVHPANSPIANKNP
DNPKKITTLSYDVYKDKRESEDQYLLHIPIAINKCPKNIFKINTEVRVLLKHDDNPYVIGIDRGERNLLYIVVVDGK
GNIVEQYSLNEIINNFNGIRIKTDYHSLLDKKEKERFEARQNWTSIENIKELKAGYISQVVHKICELVEKYDAVIAL
EDLNSGFKNSRVKVEKQVYQKFEKMLIDKLNYMVDKKSNPCATGGALKGYQITNKFESFKSMSTQNGFIFYIPAWLT
SKIDPSTGFVNLLKTKYTSIADSKKFISSFDRIMYVPEEDLFEFALDYKNFSRTDADYIKKWKLYSYGNRIRIFRNP
KKNNVEDWEEVCLTSAYKELENKYGINYQQGDIRALLCEQSDKAFYSSFMALMSLMLQMRNSITGRTDVDFLISPVK
NSDGIFYDSRNYEAQENAILPKNADANGAYNIARKVLWAIGQFKKAEDEKLDKVKIAISNKEWLEYAQTSVKH
XPXPXPXPXPXPXPXPXPXPXPMVSKGEELFTGVVPILVELDGDVNGHKFSVSGEGEGDATYGKLTLKFICTTGKLP
VPWPTLVTTVTYGVQCFSRYPDHMKQHDFFKSAMPEGYVQERTIFFKDDGNYKTRAEVKFEGDTLVNRIELKGIDFK
EDGNILGHKLEYNYNSHNVYIMADKQKNGIKVNFKIRHNIEDGSVQLADHYQQNTPIGDGPVLLPDNHYLSTQSALS
KDPNEKRDHMVLLEFVTAAGITLGMDELYK
SEQ ID NO: 272
MSKLEKFTNCYSLSKTLRFKAIPVGKTQENIDNKRLLVEDEKRAEDYKGVKKLLDRYYLSFINDVLHSIKLKNLNNY
ISLFRKKTRTEKENKELENLEINLRKEIAKAFKGNEGYKSLFKKDIIETILPEFLDDKDEIALVNSENGETTAFTGE
FDNRENMESEEAKSTSIAFRCINENLTRYISNMDIFEKVDAIFDKHEVQEIKEKILNSDYDVEDFFEGEFFNEVLIQ
EGIDVYNAIIGGFVTESGEKIKGLNEYINLYNQKTKQKLPKFKPLYKQVLSDRESLSFYGEGYTSDEEVLEVERNTL
NKNSEIFSSIKKLEKLFKNFDEYSSAGIFVKNGPAISTISKDIFGEWNVIRDKWNAEYDDIHLKKKAVVTEKYEDDR
RKSFKKIGSFSLEQLQEYADADLSVVEKLKEIIIQKVDEIYKVYGSSEKLFDADFVLEKSLKKNDAVVAIMKDLLDS
VKSFENYIKAFFGEGKETNRDESFYGDFVLAYDILLKVDHIYDAIRNYVTQKPYSKDKFKLYFQNPQFMGGWDKDKE
TDYRATILRYGSKYYLAIMDKKYAKCLQKIDKDDVNGNYEKINYKLLPGPNKMLPKVFFSKKWMAYYNPSEDIQKIY
KNGTFKKGDMFNLNDCHKLIDFFKDSISRYPKWSNAYDENFSETEKYKDIAGFYREVEEQGYKVSFESASKKEVDKL
VEEGKLYMFQIYNKDFSDKSHGTPNLHTMYFKLLFDENNHGQIRLSGGAELFMRRASLKKEELVVHPANSPIANKNP
DNPKKITTLSYDVYKDKRESEDQYLLHIPIAINKCPKNIFKINTEVRVLLKHDDNPYVIGIDRGERNLLYIVVVDGK
GNIVEQYSLNEIINNFNGIRIKTDYHSLLDKKEKERFEARQNWTSIENIKELKAGYISQVVHKICELVEKYDAVIAL
EDLNSGFKNSRVKVEKQVYQKFEKMLIDKLNYMVDKKSNPCATGGALKGYQITNKFESFKSMSTQNGFIFYIPAWLT
SKIDPSTGFVNLLKTKYTSIADSKKFISSFDRIMYVPEEDLFEFALDYKNFSRTDADYIKKWKLYSYGNRIRIFRNP
KKNNVEDWEEVCLTSAYKELENKYGINYQQGDIRALLCEQSDKAFYSSFMALMSLMLQMRNSITGRTDVDFLISPVK
NSDGIFYDSRNYEAQENAILPKNADANGAYNIARKVLWAIGQFKKAEDEKLDKVKIAISNKEWLEYAQTSVKH
XPXPXPXPXPXPXPXPXPXPXPXPMVSKGEELFTGVVPILVELDGDVNGHKFSVSGEGEGDATYGKLTLKFICTTGK
LPVPWPTLVTTVTYGVQCFSRYPDHMKQHDFFKSAMPEGYVQERTIFFKDDGNYKTRAEVKFEGDTLVNRIELKGID
FKEDGNILGHKLEYNYNSHNVYIMADKQKNGIKVNFKIRHNIEDGSVQLADHYQQNTPIGDGPVLLPDNHYLSTQSA
LSKDPNEKRDHMVLLEFVTAAGITLGMDELYK
SEQ ID NO: 273
MSKLEKFTNCYSLSKTLRFKAIPVGKTQENIDNKRLLVEDEKRAEDYKGVKKLLDRYYLSFINDVLHSIKLKNLNNY
ISLFRKKTRTEKENKELENLEINLRKEIAKAFKGNEGYKSLFKKDIIETILPEFLDDKDEIALVNSENGETTAFTGE
FDNRENMESEEAKSTSIAFRCINENLTRYISNMDIFEKVDAIFDKHEVQEIKEKILNSDYDVEDFFEGEFFNEVLIQ
EGIDVYNAIIGGFVTESGEKIKGLNEYINLYNQKTKQKLPKFKPLYKQVLSDRESLSFYGEGYTSDEEVLEVERNTL
NKNSEIFSSIKKLEKLFKNFDEYSSAGIFVKNGPAISTISKDIFGEWNVIRDKWNAEYDDIHLKKKAVVTEKYEDDR
RKSFKKIGSFSLEQLQEYADADLSVVEKLKEIIIQKVDEIYKVYGSSEKLFDADFVLEKSLKKNDAVVAIMKDLLDS
VKSFENYIKAFFGEGKETNRDESFYGDFVLAYDILLKVDHIYDAIRNYVTQKPYSKDKFKLYFQNPQFMGGWDKDKE
TDYRATILRYGSKYYLAIMDKKYAKCLQKIDKDDVNGNYEKINYKLLPGPNKMLPKVFFSKKWMAYYNPSEDIQKIY
KNGTFKKGDMFNLNDCHKLIDFFKDSISRYPKWSNAYDENFSETEKYKDIAGFYREVEEQGYKVSFESASKKEVDKL
VEEGKLYMFQIYNKDFSDKSHGTPNLHTMYFKLLFDENNHGQIRLSGGAELFMRRASLKKEELVVHPANSPIANKNP
DNPKKITTLSYDVYKDKRESEDQYLLHIPIAINKCPKNIFKINTEVRVLLKHDDNPYVIGIDRGERNLLYIVVVDGK
GNIVEQYSLNEIINNFNGIRIKTDYHSLLDKKEKERFEARQNWTSIENIKELKAGYISQVVHKICELVEKYDAVIAL
EDLNSGFKNSRVKVEKQVYQKFEKMLIDKLNYMVDKKSNPCATGGALKGYQITNKFESFKSMSTQNGFIFYIPAWLT
SKIDPSTGFVNLLKTKYTSIADSKKFISSFDRIMYVPEEDLFEFALDYKNFSRTDADYIKKWKLYSYGNRIRIFRNP
KKNNVEDWEEVCLTSAYKELENKYGINYQQGDIRALLCEQSDKAFYSSFMALMSLMLQMRNSITGRTDVDFLISPVK
NSDGIFYDSRNYEAQENAILPKNADANGAYNIARKVLWAIGQFKKAEDEKLDKVKIAISNKEWLEYAQTSVKH
XPXPXPXPXPXPXPXPXPXPXPXPXPMVSKGEELFTGVVPILVELDGDVNGHKFSVSGEGEGDATYGKLTLKFICTT
GKLPVPWPTLVTTVTYGVQCFSRYPDHMKQHDFFKSAMPEGYVQERTIFFKDDGNYKTRAEVKFEGDTLVNRIELKG
IDFKEDGNILGHKLEYNYNSHNVYIMADKQKNGIKVNFKIRHNIEDGSVQLADHYQQNTPIGDGPVLLPDNHYLSTQ
SALSKDPNEKRDHMVLLEFVTAAGITLGMDELYK
SEQ ID NO: 274
MSKLEKFTNCYSLSKTLRFKAIPVGKTQENIDNKRLLVEDEKRAEDYKGVKKLLDRYYLSFINDVLHSIKLKNLNNY
ISLFRKKTRTEKENKELENLEINLRKEIAKAFKGNEGYKSLFKKDIIETILPEFLDDKDEIALVNSENGETTAFTGE
FDNRENMESEEAKSTSIAFRCINENLTRYISNMDIFEKVDAIFDKHEVQEIKEKILNSDYDVEDFFEGEFFNEVLIQ
EGIDVYNAIIGGFVTESGEKIKGLNEYINLYNQKTKQKLPKFKPLYKQVLSDRESLSFYGEGYTSDEEVLEVERNTL
NKNSEIFSSIKKLEKLFKNFDEYSSAGIFVKNGPAISTISKDIFGEWNVIRDKWNAEYDDIHLKKKAVVTEKYEDDR
RKSFKKIGSFSLEQLQEYADADLSVVEKLKEIIIQKVDEIYKVYGSSEKLFDADFVLEKSLKKNDAVVAIMKDLLDS
VKSFENYIKAFFGEGKETNRDESFYGDFVLAYDILLKVDHIYDAIRNYVTQKPYSKDKFKLYFQNPQFMGGWDKDKE
TDYRATILRYGSKYYLAIMDKKYAKCLQKIDKDDVNGNYEKINYKLLPGPNKMLPKVFFSKKWMAYYNPSEDIQKIY
KNGTFKKGDMFNLNDCHKLIDFFKDSISRYPKWSNAYDENFSETEKYKDIAGFYREVEEQGYKVSFESASKKEVDKL
VEEGKLYMFQIYNKDFSDKSHGTPNLHTMYFKLLFDENNHGQIRLSGGAELFMRRASLKKEELVVHPANSPIANKNP
DNPKKITTLSYDVYKDKRESEDQYLLHIPIAINKCPKNIFKINTEVRVLLKHDDNPYVIGIDRGERNLLYIVVVDGK
GNIVEQYSLNEIINNFNGIRIKTDYHSLLDKKEKERFEARQNWTSIENIKELKAGYISQVVHKICELVEKYDAVIAL
EDLNSGFKNSRVKVEKQVYQKFEKMLIDKLNYMVDKKSNPCATGGALKGYQITNKFESFKSMSTQNGFIFYIPAWLT
SKIDPSTGFVNLLKTKYTSIADSKKFISSFDRIMYVPEEDLFEFALDYKNFSRTDADYIKKWKLYSYGNRIRIFRNP
KKNNVEDWEEVCLTSAYKELENKYGINYQQGDIRALLCEQSDKAFYSSFMALMSLMLQMRNSITGRTDVDFLISPVK
NSDGIFYDSRNYEAQENAILPKNADANGAYNIARKVLWAIGQFKKAEDEKLDKVKIAISNKEWLEYAQTSVKH
XPXPXPXPXPXPXPXPXPXPXPXPXPXPMVSKGEELFTGVVPILVELDGDVNGHKFSVSGEGEGDATYGKLTLKFIC
TTGKLPVPWPTLVTTVTYGVQCFSRYPDHMKQHDFFKSAMPEGYVQERTIFFKDDGNYKTRAEVKFEGDTLVNRIEL
KGIDFKEDGNILGHKLEYNYNSHNVYIMADKQKNGIKVNFKIRHNIEDGSVQLADHYQQNTPIGDGPVLLPDNHYLS
TQSALSKDPNEKRDHMVLLEFVTAAGITLGMDELYK
SEQ ID NO: 275
MSKLEKFTNCYSLSKTLRFKAIPVGKTQENIDNKRLLVEDEKRAEDYKGVKKLLDRYYLSFINDVLHSIKLKNLNNY
ISLFRKKTRTEKENKELENLEINLRKEIAKAFKGNEGYKSLFKKDIIETILPEFLDDKDEIALVNSENGETTAFTGE
FDNRENMESEEAKSTSIAFRCINENLTRYISNMDIFEKVDAIFDKHEVQEIKEKILNSDYDVEDFFEGEFFNEVLIQ
EGIDVYNAIIGGFVTESGEKIKGLNEYINLYNQKTKQKLPKFKPLYKQVLSDRESLSFYGEGYTSDEEVLEVERNTL
NKNSEIFSSIKKLEKLFKNFDEYSSAGIFVKNGPAISTISKDIFGEWNVIRDKWNAEYDDIHLKKKAVVTEKYEDDR
RKSFKKIGSFSLEQLQEYADADLSVVEKLKEIIIQKVDEIYKVYGSSEKLFDADFVLEKSLKKNDAVVAIMKDLLDS
VKSFENYIKAFFGEGKETNRDESFYGDFVLAYDILLKVDHIYDAIRNYVTQKPYSKDKFKLYFQNPQFMGGWDKDKE
TDYRATILRYGSKYYLAIMDKKYAKCLQKIDKDDVNGNYEKINYKLLPGPNKMLPKVFFSKKWMAYYNPSEDIQKIY
KNGTFKKGDMFNLNDCHKLIDFFKDSISRYPKWSNAYDENFSETEKYKDIAGFYREVEEQGYKVSFESASKKEVDKL
VEEGKLYMFQIYNKDFSDKSHGTPNLHTMYFKLLFDENNHGQIRLSGGAELFMRRASLKKEELVVHPANSPIANKNP
DNPKKITTLSYDVYKDKRESEDQYLLHIPIAINKCPKNIFKINTEVRVLLKHDDNPYVIGIDRGERNLLYIVVVDGK
GNIVEQYSLNEIINNFNGIRIKTDYHSLLDKKEKERFEARQNWTSIENIKELKAGYISQVVHKICELVEKYDAVIAL
EDLNSGFKNSRVKVEKQVYQKFEKMLIDKLNYMVDKKSNPCATGGALKGYQITNKFESFKSMSTQNGFIFYIPAWLT
SKIDPSTGFVNLLKTKYTSIADSKKFISSFDRIMYVPEEDLFEFALDYKNFSRTDADYIKKWKLYSYGNRIRIFRNP
KKNNVEDWEEVCLTSAYKELENKYGINYQQGDIRALLCEQSDKAFYSSFMALMSLMLQMRNSITGRTDVDFLISPVK
NSDGIFYDSRNYEAQENAILPKNADANGAYNIARKVLWAIGQFKKAEDEKLDKVKIAISNKEWLEYAQTSVKH
GGGGSEAAAKGGGGSMVSKGEELFTGVVPILVELDGDVNGHKFSVSGEGEGDATYGKLTLKFICTTGKLPVPWPTLV
TTVTYGVQCFSRYPDHMKQHDFFKSAMPEGYVQERTIFFKDDGNYKTRAEVKFEGDTLVNRIELKGIDFKEDGNILG
HKLEYNYNSHNVYIMADKQKNGIKVNFKIRHNIEDGSVQLADHYQQNTPIGDGPVLLPDNHYLSTQSALSKDPNEKR
DHMVLLEFVTAAGITLGMDELYK

[0102] Table V.8 provides chimera fusion proteins between LbCas12a variant amino acid sequences (E795L), linker amino acid sequences (underlined), and mCherry amino acid sequences (bolded, italicized).

TABLE V.8
LbCas12a(E795L)-Linker-mCherry Chimeras

SEQ ID NO: 276
MSKLEKFTNCYSLSKTLRFKAIPVGKTQENIDNKRLLVEDEKRAEDYKGVKKLLDRYYLSFINDVLHSIKLKNLNNY
ISLFRKKTRTEKENKELENLEINLRKEIAKAFKGNEGYKSLFKKDIIETILPEFLDDKDEIALVNSFNGFTTAFTGF
FDNRENMFSEEAKSTSIAFRCINENLTRYISNMDIFEKVDAIFDKHEVQEIKEKILNSDYDVEDFFEGEFFNFVLTQ
EGIDVYNAIIGGFVTESGEKIKGLNEYINLYNQKTKQKLPKFKPLYKQVLSDRESLSFYGEGYTSDEEVLEVFRNTL
NKNSEIFSSIKKLEKLFKNFDEYSSAGIFVKNGPAISTISKDIFGEWNVIRDKWNAEYDDIHLKKKAVVTEKYEDDR
RKSFKKIGSFSLEQLQEYADADLSVVEKLKEIIIQKVDEIYKVYGSSEKLFDADFVLEKSLKKNDAVVAIMKDLLDS
VKSFENYIKAFFGEGKETNRDESFYGDFVLAYDILLKVDHIYDAIRNYVTQKPYSKDKFKLYFQNPQFMGGWDKDKE
TDYRATILRYGSKYYLAIMDKKYAKCLQKIDKDDVNGNYEKINYKLLPGPNKMLPKVFFSKKWMAYYNPSEDIQKIY
KNGTFKKGDMFNLNDCHKLIDFFKDSISRYPKWSNAYDFNFSETEKYKDIAGFYREVEEQGYKVSFESASKKEVDKL
VEEGKLYMFQIYNKDFSDKSHGTPNLHTMYFKLLFDENNHGQIRLSGGAELFMRRASLKKEELVVHPANSPIANKNP
DNPKKTTTLSYDVYKDKRFSEDQYLLHIPIAINKCPKNIFKINTEVRVLLKHDDNPYVIGIDRGERNLLYIVVVDGK
GNIVEQYSLNEIINNFNGIRIKTDYHSLLDKKEKERFEARQNWTSIENIKELKAGYISQVVHKICELVEKYDAVIAL
EDLNSGFKNSRVKVEKQVYQKFEKMLIDKLNYMVDKKSNPCATGGALKGYQITNKFESFKSMSTQNGFIFYIPAWLT
SKIDPSTGFVNLLKTKYTSIADSKKFISSFDRIMYVPEEDLFEFALDYKNFSRTDADYIKKWKLYSYGNRIRIFRNP
KKNNVFDWEEVCLTSAYKELFNKYGINYQQGDIRALLCEQSDKAFYSSFMALMSLMLQMRNSITGRTDVDFLISPVK
NSDGIFYDSRNYEAQENAILPKNADANGAYNIARKVLWAIGQFKKAEDEKLDKVKIAISNKEWLEYAQTSVKH
GSAGSAAGSGEFMVSKGEEDNMAIIKEFMRFKVHMEGSVNGHEFEIEGEGEGRPYEGTQTAKLKVTKGGPLPFAWD
ILSPQFMYGSKAYVKHPADIPDYLKLSFPEGFKWERVMNFEDGGVVTVTQDSSLQDGEFIYKVKLRGTNFPSDGPV
MQKKTMGWEASSERMYPEDGALKGEIKQRLKLKDGGHYDEAVKTTYKAKKPVQLPGAYNVNIKLDITSHNEDYTIV
EQYEREAGRHSTGGMDELYK
SEQ ID NO: 277
MSKLEKFTNCYSLSKTLRFKAIPVGKTQENIDNKRLLVEDEKRAEDYKGVKKLLDRYYLSFINDVLHSIKLKNLNNY
ISLFRKKTRTEKENKELENLEINLRKEIAKAFKGNEGYKSLFKKDIIETILPEFLDDKDEIALVNSFNGFTTAFTGF
FDNRENMFSEEAKSTSIAFRCINENLTRYISNMDIFEKVDAIFDKHEVQEIKEKILNSDYDVEDFFEGEFFNEVLTQ
EGIDVYNAIIGGFVTESGEKIKGLNEYINLYNQKTKQKLPKFKPLYKQVLSDRESLSFYGEGYTSDEEVLEVFRNTL
NKNSEIFSSIKKLEKLFKNFDEYSSAGIFVKNGPAISTISKDIFGEWNVIRDKWNAEYDDIHLKKKAVVTEKYEDDR
RKSFKKIGSFSLEQLQEYADADLSVVEKLKEIIIQKVDEIYKVYGSSEKLFDADFVLEKSLKKNDAVVAIMKDLLDS
VKSFENYIKAFFGEGKETNRDESFYGDFVLAYDILLKVDHIYDAIRNYVTQKPYSKDKFKLYFQNPQFMGGWDKDKE
TDYRATILRYGSKYYLAIMDKKYAKCLQKIDKDDVNGNYEKINYKLLPGPNKMLPKVFFSKKWMAYYNPSEDIQKIY
KNGTFKKGDMFNLNDCHKLIDFFKDSISRYPKWSNAYDENFSETEKYKDIAGFYREVEEQGYKVSFESASKKEVDKL
VEEGKLYMFQIYNKDFSDKSHGTPNLHTMYFKLLFDENNHGQIRLSGGAELFMRRASLKKEELVVHPANSPIANKNP
DNPKKITTLSYDVYKDKRFSEDQYLLHIPIAINKCPKNIFKINTEVRVLLKHDDNPYVIGIDRGERNLLYIVVVDGK
GNIVEQYSLNEIINNFNGIRIKTDYHSLLDKKEKERFEARQNWTSIENIKELKAGYISQVVHKICELVEKYDAVIAL
EDLNSGFKNSRVKVEKQVYQKFEKMLIDKLNYMVDKKSNPCATGGALKGYQITNKFESFKSMSTQNGFIFYIPAWLT
SKIDPSTGFVNLLKTKYTSIADSKKFISSFDRIMYVPEEDLFEFALDYKNFSRTDADYIKKWKLYSYGNRIRIFRNP
KKNNVFDWEEVCLTSAYKELFNKYGINYQQGDIRALLCEQSDKAFYSSFMALMSLMLQMRNSITGRTDVDFLISPVK
NSDGIFYDSRNYEAQENAILPKNADANGAYNIARKVLWAIGQFKKAEDEKLDKVKIAISNKEWLEYAQTSVKH
GGGGSGGGGSGGGGSGGGGSMVSKGEEDNMAIIKEFMRFKVHMEGSVNGHEFEIEGEGEGRPYEGTQTAKLKVTKG
GPLPFAWDILSPQFMYGSKAYVKHPADIPDYLKLSFPEGFKWERVMNFEDGGVVTVTQDSSLQDGEFIYKVKLRGT
NFNFPSDGPVMQKKTMGWEASSERMYPEDGALKGEIKQRLKLKDGGHYDEAVKTTYKAKKPVQLPGAYNVNIKLDI
TSHNEDYTIVEQYEREAGRHSTGGMDELYK
SEQ ID NO: 278
MSKLEKFTNCYSLSKTLRFKAIPVGKTQENIDNKRLLVEDEKRAEDYKGVKKLLDRYYLSFINDVLHSIKLKNLNNY
ISLFRKKTRTEKENKELENLEINLRKEIAKAFKGNEGYKSLFKKDIIETILPEFLDDKDEIALVNSFNGFTTAFTGF
FDNRENMESEEAKSTSIAFRCINENLTRYISNMDIFEKVDAIFDKHEVQEIKEKILNSDYDVEDFFEGEFFNEVLTQ
EGIDVYNAIIGGFVTESGEKIKGLNEYINLYNQKTKQKLPKFKPLYKQVLSDRESLSFYGEGYTSDEEVLEVERNTL
NKNSEIFSSIKKLEKLFKNFDEYSSAGIFVKNGPAISTISKDIFGEWNVIRDKWNAEYDDIHLKKKAVVTEKYEDDR
RKSFKKIGSFSLEQLQEYADADLSVVEKLKEIIIQKVDEIYKVYGSSEKLFDADFVLEKSLKKNDAVVAIMKDLLDS
VKSFENYIKAFFGEGKETNRDESFYGDFVLAYDILLKVDHIYDAIRNYVTQKPYSKDKFKLYFQNPQFMGGWDKDKE
TDYRATILRYGSKYYLAIMDKKYAKCLQKIDKDDVNGNYEKINYKLLPGPNKMLPKVFFSKKWMAYYNPSEDIQKIY
KNGTFKKGDMFNLNDCHKLIDFFKDSISRYPKWSNAYDENFSETEKYKDIAGFYREVEEQGYKVSFESASKKEVDKL
VEEGKLYMFQIYNKDFSDKSHGTPNLHTMYFKLLFDENNHGQIRLSGGAELFMRRASLKKEELVVHPANSPIANKNP
DNPKKITTLSYDVYKDKRFSEDQYLLHIPIAINKCPKNIFKINTEVRVLLKHDDNPYVIGIDRGERNLLYIVVVDGK
GNIVEQYSLNEIINNFNGIRIKTDYHSLLDKKEKERFEARQNWTSIENIKELKAGYISQVVHKICELVEKYDAVIAL
EDLNSGFKNSRVKVEKQVYQKFEKMLIDKLNYMVDKKSNPCATGGALKGYQITNKFESFKSMSTQNGFIFYIPAWLT
SKIDPSTGFVNLLKTKYTSIADSKKFISSFDRIMYVPEEDLFEFALDYKNFSRTDADYIKKWKLYSYGNRIRIFRNP
KKNNVFDWEEVCLTSAYKELFNKYGINYQQGDIRALLCEQSDKAFYSSFMALMSLMLQMRNSITGRTDVDFLISPVK
NSDGIFYDSRNYEAQENAILPKNADANGAYNIARKVLWAIGQFKKAEDEKLDKVKIAISNKEWLEYAQTSVKH
AEAAAKEAAAKEAAAKEAAAKAMVSKGEEDNMAIIKEFMRFKVHMEGSVNGHEFEIEGEGEGRPYEGTQTAKLKVTK
GGPLPFAWDILSPQFMYGSKAYVKHPADIPDYLKLSFPEGFKWERVMNFEDGGVVTVTQDSSLQDGEFIYKVKLRGT
NFNFPSDGPVMQKKTMGWEASSERMYPEDGALKGEIKQRLKLKDGGHYDEAVKTTYKAKKPVQLPGAYNVNIKLDI
TSHNEDYTIVEQYEREAGRHSTGGMDELYK
SEQ ID NO: 279
MSKLEKFTNCYSLSKTLRFKAIPVGKTQENIDNKRLLVEDEKRAEDYKGVKKLLDRYYLSFINDVLHSIKLKNLNNY
ISLFRKKTRTEKENKELENLEINLRKEIAKAFKGNEGYKSLFKKDIIETILPEFLDDKDEIALVNSFNGFTTAFTGF
FDNRENMFSEEAKSTSIAFRCINENLTRYISNMDIFEKVDAIFDKHEVQEIKEKILNSDYDVEDFFEGEFFNFVLTQ
EGIDVYNAIIGGFVTESGEKIKGLNEYINLYNQKTKQKLPKFKPLYKQVLSDRESLSFYGEGYTSDEEVLEVFRNTL
NKNSEIFSSIKKLEKLFKNFDEYSSAGIFVKNGPAISTISKDIFGEWNVIRDKWNAEYDDIHLKKKAVVTEKYEDDR
RKSFKKIGSFSLEQLQEYADADLSVVEKLKEIIIQKVDEIYKVYGSSEKLFDADFVLEKSLKKNDAVVAIMKDLLDS
VKSFENYIKAFFGEGKETNRDESFYGDFVLAYDILLKVDHIYDAIRNYVTQKPYSKDKFKLYFQNPQFMGGWDKDKE
TDYRATILRYGSKYYLAIMDKKYAKCLQKIDKDDVNGNYEKINYKLLPGPNKMLPKVFFSKKWMAYYNPSEDIQKIY
KNGTFKKGDMFNLNDCHKLIDFFKDSISRYPKWSNAYDENFSETEKYKDIAGFYREVEEQGYKVSFESASKKEVDKL
VEEGKLYMFQIYNKDFSDKSHGTPNLHTMYFKLLFDENNHGQIRLSGGAELFMRRASLKKEELVVHPANSPIANKNP
DNPKKTTTLSYDVYKDKRFSEDQYLLHIPIAINKCPKNIFKINTEVRVLLKHDDNPYVIGIDRGERNLLYIVVVDGK
GNIVEQYSLNEIINNFNGIRIKTDYHSLLDKKEKERFEARQNWTSIENIKELKAGYISQVVHKICELVEKYDAVIAL
EDLNSGFKNSRVKVEKQVYQKFEKMLIDKLNYMVDKKSNPCATGGALKGYQITNKFESFKSMSTQNGFIFYIPAWLT
SKIDPSTGFVNLLKTKYTSIADSKKFISSFDRIMYVPEEDLFEFALDYKNFSRTDADYIKKWKLYSYGNRIRIFRNP
KKNNVFDWEEVCLTSAYKELFNKYGINYQQGDIRALLCEQSDKAFYSSFMALMSLMLQMRNSITGRTDVDFLISPVK
NSDGIFYDSRNYEAQENAILPKNADANGAYNIARKVLWAIGQFKKAEDEKLDKVKIAISNKEWLEYAQTSVKH
AEAAAKEAAAKEAAAKEAAAKALEAEAAAKEAAAKEAAAKEAAAKAMVSKGEEDNMAIIKEFMRFKVHMEGSVNGHE
FEIEGEGEGRPYEGTQTAKLKVTKGGPLPFAWDILSPQFMYGSKAYVKHPADIPDYLKLSFPEGFKWERVMNFEDGG
VVTVTQDSSLQDGEFIYKVKLRGTNFNFPSDGPVMQKKTMGWEASSERMYPEDGALKGEIKQRLKLKDGGHYDEAVK
TTYKAKKPVQLPGAYNVNIKLDITSHNEDYTIVEQYEREAGRHSTGGMDELYK
SEQ ID NO: 280
MSKLEKFTNCYSLSKTLRFKAIPVGKTQENIDNKRLLVEDEKRAEDYKGVKKLLDRYYLSFINDVLHSIKLKNLNNY
ISLFRKKTRTEKENKELENLEINLRKEIAKAFKGNEGYKSLFKKDIIETILPEFLDDKDEIALVNSFNGFTTAFTGF
FDNRENMFSEEAKSTSIAFRCINENLTRYISNMDIFEKVDAIFDKHEVQEIKEKILNSDYDVEDFFEGEFFNEVLTQ
EGIDVYNAIIGGFVTESGEKIKGLNEYINLYNQKTKQKLPKFKPLYKQVLSDRESLSFYGEGYTSDEEVLEVERNTL
NKNSEIFSSIKKLEKLFKNFDEYSSAGIFVKNGPAISTISKDIFGEWNVIRDKWNAEYDDIHLKKKAVVTEKYEDDR
RKSFKKIGSFSLEQLQEYADADLSVVEKLKEIIIQKVDEIYKVYGSSEKLFDADFVLEKSLKKNDAVVAIMKDLLDS
VKSFENYIKAFFGEGKETNRDESFYGDFVLAYDILLKVDHIYDAIRNYVTQKPYSKDKFKLYFQNPQFMGGWDKDKE
TDYRATILRYGSKYYLAIMDKKYAKCLQKIDKDDVNGNYEKINYKLLPGPNKMLPKVFFSKKWMAYYNPSEDIQKIY
KNGTFKKGDMFNLNDCHKLIDFFKDSISRYPKWSNAYDFNFSETEKYKDIAGFYREVEEQGYKVSFESASKKEVDKL
VEEGKLYMFQIYNKDFSDKSHGTPNLHTMYFKLLFDENNHGQIRLSGGAELFMRRASLKKEELVVHPANSPIANKNP
DNPKKTTTLSYDVYKDKRFSEDQYLLHIPIAINKCPKNIFKINTEVRVLLKHDDNPYVIGIDRGERNLLYIVVVDGK
GNIVEQYSLNEIINNFNGIRIKTDYHSLLDKKEKERFEARQNWTSIENIKELKAGYISQVVHKICELVEKYDAVIAL
EDLNSGFKNSRVKVEKQVYQKFEKMLIDKLNYMVDKKSNPCATGGALKGYQITNKFESFKSMSTQNGFIFYIPAWLT
SKIDPSTGFVNLLKTKYTSIADSKKFISSFDRIMYVPEEDLFEFALDYKNFSRTDADYIKKWKLYSYGNRIRIFRNP
KKNNVFDWEEVCLTSAYKELFNKYGINYQQGDIRALLCEQSDKAFYSSFMALMSLMLQMRNSITGRTDVDFLISPVK
NSDGIFYDSRNYEAQENAILPKNADANGAYNIARKVLWAIGQFKKAEDEKLDKVKIAISNKEWLEYAQTSVKH
LEAEAAAKEAAAKEAAAKEAAAKALEAEAAAKEAAAKEAAAKEAAAKALEMVSKGEEDNMAIIKEFMRFKVHMEGSV
NGHEFEIEGEGEGRPYEGTQTAKLKVTKGGPLPFAWDILSPQFMYGSKAYVKHPADIPDYLKLSFPEGFKWERVMNF
EDGGVVTVTQDSSLQDGEFIYKVKLRGTNFNFPSDGPVMQKKTMGWEASSERMYPEDGALKGEIKQRLKLKDGGHYD
EAVKTTYKAKKPVQLPGAYNVNIKLDITSHNEDYTIVEQYEREAGRHSTGGMDELYK
SEQ ID NO: 281
MSKLEKFTNCYSLSKTLRFKAIPVGKTQENIDNKRLLVEDEKRAEDYKGVKKLLDRYYLSFINDVLHSIKLKNLNNY
ISLFRKKTRTEKENKELENLEINLRKEIAKAFKGNEGYKSLFKKDIIETILPEFLDDKDEIALVNSFNGFTTAFTGF
FDNRENMFSEEAKSTSIAFRCINENLTRYISNMDIFEKVDAIFDKHEVQEIKEKILNSDYDVEDFFEGEFFNFVLTQ
EGIDVYNAIIGGFVTESGEKIKGLNEYINLYNQKTKQKLPKFKPLYKQVLSDRESLSFYGEGYTSDEEVLEVFRNTL
NKNSEIFSSIKKLEKLFKNFDEYSSAGIFVKNGPAISTISKDIFGEWNVIRDKWNAEYDDIHLKKKAVVTEKYEDDR
RKSFKKIGSFSLEQLQEYADADLSVVEKLKEIIIQKVDEIYKVYGSSEKLFDADFVLEKSLKKNDAVVAIMKDLLDS
VKSFENYIKAFFGEGKETNRDESFYGDFVLAYDILLKVDHIYDAIRNYVTQKPYSKDKFKLYFQNPQFMGGWDKDKE
TDYRATILRYGSKYYLAIMDKKYAKCLQKIDKDDVNGNYEKINYKLLPGPNKMLPKVFFSKKWMAYYNPSEDIQKIY
KNGTFKKGDMFNLNDCHKLIDFFKDSISRYPKWSNAYDFNFSETEKYKDIAGFYREVEEQGYKVSFESASKKEVDKL
VEEGKLYMFQIYNKDFSDKSHGTPNLHTMYFKLLFDENNHGQIRLSGGAELFMRRASLKKEELVVHPANSPIANKNP
DNPKKTTTLSYDVYKDKRFSEDQYLLHIPIAINKCPKNIFKINTEVRVLLKHDDNPYVIGIDRGERNLLYIVVVDGK
GNIVEQYSLNEIINNFNGIRIKTDYHSLLDKKEKERFEARQNWTSIENIKELKAGYISQVVHKICELVEKYDAVIAL
EDLNSGFKNSRVKVEKQVYQKFEKMLIDKLNYMVDKKSNPCATGGALKGYQITNKFESFKSMSTQNGFIFYIPAWLT
SKIDPSTGFVNLLKTKYTSIADSKKFISSFDRIMYVPEEDLFEFALDYKNFSRTDADYIKKWKLYSYGNRIRIFRNP
KKNNVFDWEEVCLTSAYKELFNKYGINYQQGDIRALLCEQSDKAFYSSFMALMSLMLQMRNSITGRTDVDFLISPVK
NSDGIFYDSRNYEAQENAILPKNADANGAYNIARKVLWAIGQFKKAEDEKLDKVKIAISNKEWLEYAQTSVKH
APAMVSKGEEDNMAIIKEFMRFKVHMEGSVNGHEFEIEGEGEGRPYEGTQTAKLKVTKGGPLPFAWDILSPQFMYGS
KAYVKHPADIPDYLKLSFPEGFKWERVMNFEDGGVVTVTQDSSLQDGEFIYKVKLRGTNFNFPSDGPVMQKKTMGWE
ASSERMYPEDGALKGEIKQRLKLKDGGHYDEAVKTTYKAKKPVQLPGAYNVNIKLDITSHNEDYTIVEQYEREAGRH
STGGMDELYK
SEQ ID NO: 282
MSKLEKFTNCYSLSKTLRFKAIPVGKTQENIDNKRLLVEDEKRAEDYKGVKKLLDRYYLSFINDVLHSIKLKNLNNY
ISLFRKKTRTEKENKELENLEINLRKEIAKAFKGNEGYKSLFKKDIIETILPEFLDDKDEIALVNSENGETTAFTGF
FDNRENMFSEEAKSTSIAFRCINENLTRYISNMDIFEKVDAIFDKHEVQEIKEKILNSDYDVEDFFEGEFFNEVLTQ
EGIDVYNAIIGGFVTESGEKIKGLNEYINLYNQKTKQKLPKFKPLYKQVLSDRESLSFYGEGYTSDEEVLEVERNTL
NKNSEIFSSIKKLEKLFKNFDEYSSAGIFVKNGPAISTISKDIFGEWNVIRDKWNAEYDDIHLKKKAVVTEKYEDDR
RKSFKKIGSFSLEQLQEYADADLSVVEKLKEIIIQKVDEIYKVYGSSEKLFDADFVLEKSLKKNDAVVAIMKDLLDS
VKSFENYIKAFFGEGKETNRDESFYGDFVLAYDILLKVDHIYDAIRNYVTQKPYSKDKFKLYFQNPQFMGGWDKDKE
TDYRATILRYGSKYYLAIMDKKYAKCLQKIDKDDVNGNYEKINYKLLPGPNKMLPKVFFSKKWMAYYNPSEDIQKIY
KNGTFKKGDMFNLNDCHKLIDFFKDSISRYPKWSNAYDENFSETEKYKDIAGFYREVEEQGYKVSFESASKKEVDKL
VEEGKLYMFQIYNKDFSDKSHGTPNLHTMYFKLLFDENNHGQIRLSGGAELFMRRASLKKEELVVHPANSPIANKNP
DNPKKTTTLSYDVYKDKRFSEDQYLLHIPIAINKCPKNIFKINTEVRVLLKHDDNPYVIGIDRGERNLLYIVVVDGK
GNIVEQYSLNEIINNFNGIRIKTDYHSLLDKKEKERFEARQNWTSIENIKELKAGYISQVVHKICELVEKYDAVIAL
EDLNSGFKNSRVKVEKQVYQKFEKMLIDKLNYMVDKKSNPCATGGALKGYQITNKFESFKSMSTQNGFIFYIPAWLT
SKIDPSTGFVNLLKTKYTSIADSKKFISSFDRIMYVPEEDLFEFALDYKNFSRTDADYIKKWKLYSYGNRIRIFRNP
KKNNVFDWEEVCLTSAYKELFNKYGINYQQGDIRALLCEQSDKAFYSSFMALMSLMLQMRNSITGRTDVDFLISPVK
NSDGIFYDSRNYEAQENAILPKNADANGAYNIARKVLWAIGQFKKAEDEKLDKVKIAISNKEWLEYAQTSVKH
APAPAMVSKGEEDNMAIIKEFMRFKVHMEGSVNGHEFEIEGEGEGRPYEGTQTAKLKVTKGGPLPFAWDILSPQFMY
GSKAYVKHPADIPDYLKLSFPEGFKWERVMNFEDGGVVTVTQDSSLQDGEFIYKVKLRGTNFNFPSDGPVMQKKTMG
WEASSERMYPEDGALKGEIKQRLKLKDGGHYDEAVKTTYKAKKPVQLPGAYNVNIKLDITSHNEDYTIVEQYEREAG
RHSTGGMDELYK
SEQ ID NO: 283
MSKLEKFTNCYSLSKTLRFKAIPVGKTQENIDNKRLLVEDEKRAEDYKGVKKLLDRYYLSFINDVLHSIKLKNLNNY
ISLFRKKTRTEKENKELENLEINLRKEIAKAFKGNEGYKSLFKKDIIETILPEFLDDKDEIALVNSFNGFTTAFTGF
FDNRENMFSEEAKSTSIAFRCINENLTRYISNMDIFEKVDAIFDKHEVQEIKEKILNSDYDVEDFFEGEFFNFVLTQ
EGIDVYNAIIGGFVTESGEKIKGLNEYINLYNQKTKQKLPKFKPLYKQVLSDRESLSFYGEGYTSDEEVLEVERNTL
NKNSEIFSSIKKLEKLFKNFDEYSSAGIFVKNGPAISTISKDIFGEWNVIRDKWNAEYDDIHLKKKAVVTEKYEDDR
RKSFKKIGSFSLEQLQEYADADLSVVEKLKEIIIQKVDEIYKVYGSSEKLFDADFVLEKSLKKNDAVVAIMKDLLDS
VKSFENYIKAFFGEGKETNRDESFYGDFVLAYDILLKVDHIYDAIRNYVTQKPYSKDKFKLYFQNPQFMGGWDKDKE
TDYRATILRYGSKYYLAIMDKKYAKCLQKIDKDDVNGNYEKINYKLLPGPNKMLPKVFFSKKWMAYYNPSEDIQKIY
KNGTFKKGDMFNLNDCHKLIDFFKDSISRYPKWSNAYDFNFSETEKYKDIAGFYREVEEQGYKVSFESASKKEVDKL
VEEGKLYMFQIYNKDFSDKSHGTPNLHTMYFKLLFDENNHGQIRLSGGAELFMRRASLKKEELVVHPANSPIANKNP
DNPKKTTTLSYDVYKDKRESEDQYLLHIPIAINKCPKNIFKINTEVRVLLKHDDNPYVIGIDRGERNLLYIVVVDGK
GNIVEQYSLNEIINNFNGIRIKTDYHSLLDKKEKERFEARQNWTSIENIKELKAGYISQVVHKICELVEKYDAVIAL
EDLNSGFKNSRVKVEKQVYQKFEKMLIDKLNYMVDKKSNPCATGGALKGYQITNKFESFKSMSTQNGFIFYIPAWLT
SKIDPSTGFVNLLKTKYTSIADSKKFISSFDRIMYVPEEDLFEFALDYKNFSRTDADYIKKWKLYSYGNRIRIFRNP
KKNNVFDWEEVCLTSAYKELFNKYGINYQQGDIRALLCEQSDKAFYSSFMALMSLMLQMRNSITGRTDVDFLISPVK
NSDGIFYDSRNYEAQENAILPKNADANGAYNIARKVLWAIGQFKKAEDEKLDKVKIAISNKEWLEYAQTSVKH
APAPAPAMVSKGEEDNMAIIKEFMRFKVHMEGSVNGHEFEIEGEGEGRPYEGTQTAKLKVTKGGPLPFAWDILSPQF
MYGSKAYVKHPADIPDYLKLSFPEGFKWERVMNFEDGGVVTVTQDSSLQDGEFIYKVKLRGTNFNFPSDGPVMQKKT
MGWEASSERMYPEDGALKGEIKQRLKLKDGGHYDEAVKTTYKAKKPVQLPGAYNVNIKLDITSHNEDYTIVEQYERE
AGRHSTGGMDELYK
SEQ ID NO: 284
MSKLEKFTNCYSLSKTLRFKAIPVGKTQENIDNKRLLVEDEKRAEDYKGVKKLLDRYYLSFINDVLHSIKLKNLNNY
ISLFRKKTRTEKENKELENLEINLRKEIAKAFKGNEGYKSLFKKDIIETILPEFLDDKDEIALVNSENGETTAFTGF
FDNRENMFSEEAKSTSIAFRCINENLTRYISNMDIFEKVDAIFDKHEVQEIKEKILNSDYDVEDFFEGEFFNEVLTQ
EGIDVYNAIIGGFVTESGEKIKGLNEYINLYNQKTKQKLPKFKPLYKQVLSDRESLSFYGEGYTSDEEVLEVERNTL
NKNSEIFSSIKKLEKLFKNFDEYSSAGIFVKNGPAISTISKDIFGEWNVIRDKWNAEYDDIHLKKKAVVTEKYEDDR
RKSFKKIGSFSLEQLQEYADADLSVVEKLKEIIIQKVDEIYKVYGSSEKLFDADFVLEKSLKKNDAVVAIMKDLLDS
VKSFENYIKAFFGEGKETNRDESFYGDFVLAYDILLKVDHIYDAIRNYVTQKPYSKDKFKLYFQNPQFMGGWDKDKE
TDYRATILRYGSKYYLAIMDKKYAKCLQKIDKDDVNGNYEKINYKLLPGPNKMLPKVFFSKKWMAYYNPSEDIQKIY
KNGTFKKGDMFNLNDCHKLIDFFKDSISRYPKWSNAYDFNFSETEKYKDIAGFYREVEEQGYKVSFESASKKEVDKL
VEEGKLYMFQIYNKDFSDKSHGTPNLHTMYFKLLFDENNHGQIRLSGGAELFMRRASLKKEELVVHPANSPIANKNP
DNPKKTTTLSYDVYKDKRFSEDQYLLHIPIAINKCPKNIFKINTEVRVLLKHDDNPYVIGIDRGERNLLYIVVVDGK
GNIVEQYSLNEIINNFNGIRIKTDYHSLLDKKEKERFEARQNWTSIENIKELKAGYISQVVHKICELVEKYDAVIAL
EDLNSGFKNSRVKVEKQVYQKFEKMLIDKLNYMVDKKSNPCATGGALKGYQITNKFESFKSMSTQNGFIFYIPAWLT
SKIDPSTGFVNLLKTKYTSIADSKKFISSFDRIMYVPEEDLFEFALDYKNFSRTDADYIKKWKLYSYGNRIRIFRNP
KKNNVFDWEEVCLTSAYKELFNKYGINYQQGDIRALLCEQSDKAFYSSFMALMSLMLQMRNSITGRTDVDFLISPVK
NSDGIFYDSRNYEAQENAILPKNADANGAYNIARKVLWAIGQFKKAEDEKLDKVKIAISNKEWLEYAQTSVKH
APAPAPAPAMVSKGEEDNMAIIKEFMRFKVHMEGSVNGHEFEIEGEGEGRPYEGTQTAKLKVTKGGPLPFAWDILSP
QFMYGSKAYVKHPADIPDYLKLSFPEGFKWERVMNFEDGGVVTVTQDSSLQDGEFIYKVKLRGTNFNFPSDGPVMQK
KTMGWEASSERMYPEDGALKGEIKQRLKLKDGGHYDEAVKTTYKAKKPVQLPGAYNVNIKLDITSHNEDYTIVEQYE
REAGRHSTGGMDELYK
SEQ ID NO: 285
MSKLEKFTNCYSLSKTLRFKAIPVGKTQENIDNKRLLVEDEKRAEDYKGVKKLLDRYYLSFINDVLHSIKLKNLNNY
ISLFRKKTRTEKENKELENLEINLRKEIAKAFKGNEGYKSLFKKDIIETILPEFLDDKDEIALVNSENGFTTAFTGE
FDNRENMFSEEAKSTSIAFRCINENLTRYISNMDIFEKVDAIFDKHEVQEIKEKILNSDYDVEDFFEGEFFNFVLTQ
EGIDVYNAIIGGFVTESGEKIKGLNEYINLYNQKTKQKLPKFKPLYKQVLSDRESLSFYGEGYTSDEEVLEVFRNTL
NKNSEIFSSIKKLEKLFKNFDEYSSAGIFVKNGPAISTISKDIFGEWNVIRDKWNAEYDDIHLKKKAVVTEKYEDDR
RKSFKKIGSFSLEQLQEYADADLSVVEKLKEIIIQKVDEIYKVYGSSEKLFDADFVLEKSLKKNDAVVAIMKDLLDS
VKSFENYIKAFFGEGKETNRDESFYGDFVLAYDILLKVDHIYDAIRNYVTQKPYSKDKFKLYFQNPQFMGGWDKDKE
TDYRATILRYGSKYYLAIMDKKYAKCLQKIDKDDVNGNYEKINYKLLPGPNKMLPKVFFSKKWMAYYNPSEDIQKIY
KNGTFKKGDMFNLNDCHKLIDFFKDSISRYPKWSNAYDENFSETEKYKDIAGFYREVEEQGYKVSFESASKKEVDKL
VEEGKLYMFQIYNKDFSDKSHGTPNLHTMYFKLLFDENNHGQIRLSGGAELFMRRASLKKEELVVHPANSPIANKNP
DNPKKTTTLSYDVYKDKRFSEDQYLLHIPIAINKCPKNIFKINTEVRVLLKHDDNPYVIGIDRGERNLLYIVVVDGK
GNIVEQYSLNEIINNFNGIRIKTDYHSLLDKKEKERFEARQNWTSIENIKELKAGYISQVVHKICELVEKYDAVIAL
EDLNSGFKNSRVKVEKQVYQKFEKMLIDKLNYMVDKKSNPCATGGALKGYQITNKFESFKSMSTQNGFIFYIPAWLT
SKIDPSTGFVNLLKTKYTSIADSKKFISSFDRIMYVPEEDLFEFALDYKNFSRTDADYIKKWKLYSYGNRIRIFRNP
KKNNVFDWEEVCLTSAYKELFNKYGINYQQGDIRALLCEQSDKAFYSSFMALMSLMLQMRNSITGRTDVDFLISPVK
NSDGIFYDSRNYEAQENAILPKNADANGAYNIARKVLWAIGQFKKAEDEKLDKVKIAISNKEWLEYAQTSVKH
APAPAPAPAPAMVSKGEEDNMAIIKEFMRFKVHMEGSVNGHEFEIEGEGEGRPYEGTQTAKLKVTKGGPLPFAWDIL
SPQFMYGSKAYVKHPADIPDYLKLSFPEGFKWERVMNFEDGGVVTVTQDSSLQDGEFIYKVKLRGTNFNFPSDGPVM
QKKTMGWEASSERMYPEDGALKGEIKQRLKLKDGGHYDEAVKTTYKAKKPVQLPGAYNVNIKLDITSHNEDYTIVEQ
YEREAGRHSTGGMDELYK
SEQ ID NO: 286
MSKLEKFTNCYSLSKTLRFKAIPVGKTQENIDNKRLLVEDEKRAEDYKGVKKLLDRYYLSFINDVLHSIKLKNLNNY
ISLFRKKTRTEKENKELENLEINLRKEIAKAFKGNEGYKSLFKKDIIETILPEFLDDKDEIALVNSENGETTAFTGE
FDNRENMFSEEAKSTSIAFRCINENLTRYISNMDIFEKVDAIFDKHEVQEIKEKILNSDYDVEDFFEGEFFNEVLTQ
EGIDVYNAIIGGFVTESGEKIKGLNEYINLYNQKTKQKLPKFKPLYKQVLSDRESLSFYGEGYTSDEEVLEVFRNTL
NKNSEIFSSIKKLEKLFKNFDEYSSAGIFVKNGPAISTISKDIFGEWNVIRDKWNAEYDDIHLKKKAVVTEKYEDDR
RKSFKKIGSFSLEQLQEYADADLSVVEKLKEIIIQKVDEIYKVYGSSEKLFDADFVLEKSLKKNDAVVAIMKDLLDS
VKSFENYIKAFFGEGKETNRDESFYGDFVLAYDILLKVDHIYDAIRNYVTQKPYSKDKFKLYFQNPQFMGGWDKDKE
TDYRATILRYGSKYYLAIMDKKYAKCLQKIDKDDVNGNYEKINYKLLPGPNKMLPKVFFSKKWMAYYNPSEDIQKIY
KNGTFKKGDMFNLNDCHKLIDFFKDSISRYPKWSNAYDENFSETEKYKDIAGFYREVEEQGYKVSFESASKKEVDKL
VEEGKLYMFQIYNKDFSDKSHGTPNLHTMYFKLLFDENNHGQIRLSGGAELFMRRASLKKEELVVHPANSPIANKNP
DNPKKITTLSYDVYKDKRFSEDQYLLHIPIAINKCPKNIFKINTEVRVLLKHDDNPYVIGIDRGERNLLYIVVVDGK
GNIVEQYSLNEIINNFNGIRIKTDYHSLLDKKEKERFEARQNWTSIENIKELKAGYISQVVHKICELVEKYDAVIAL
EDLNSGFKNSRVKVEKQVYQKFEKMLIDKLNYMVDKKSNPCATGGALKGYQITNKFESFKSMSTQNGFIFYIPAWLT
SKIDPSTGFVNLLKTKYTSIADSKKFISSFDRIMYVPEEDLFEFALDYKNFSRTDADYIKKWKLYSYGNRIRIFRNP
KKNNVEDWEEVCLTSAYKELENKYGINYQQGDIRALLCEQSDKAFYSSFMALMSLMLQMRNSITGRTDVDFLISPVK
NSDGIFYDSRNYEAQENAILPKNADANGAYNIARKVLWAIGQFKKAEDEKLDKVKIAISNKEWLEYAQTSVKH
APAPAPAPAPAPAMVSKGEEDNMAIIKEFMRFKVHMEGSVNGHEFEIEGEGEGRPYEGTQTAKLKVTKGGPLPFAWD
ILSPQFMYGSKAYVKHPADIPDYLKLSFPEGFKWERVMNFEDGGVVTVTQDSSLQDGEFIYKVKLRGTNFNFPSDGP
VMQKKTMGWEASSERMYPEDGALKGEIKQRLKLKDGGHYDEAVKTTYKAKKPVQLPGAYNVNIKLDITSHNEDYTIV
EQYEREAGRHSTGGMDELYK
SEQ ID NO: 287
MSKLEKFTNCYSLSKTLRFKAIPVGKTQENIDNKRLLVEDEKRAEDYKGVKKLLDRYYLSFINDVLHSIKLKNLNNY
ISLFRKKTRTEKENKELENLEINLRKEIAKAFKGNEGYKSLFKKDIIETILPEFLDDKDEIALVNSENGETTAFTGF
FDNRENMESEEAKSTSIAFRCINENLTRYISNMDIFEKVDAIFDKHEVQEIKEKILNSDYDVEDFFEGEFFNEVLTQ
EGIDVYNAIIGGFVTESGEKIKGLNEYINLYNQKTKQKLPKFKPLYKQVLSDRESLSFYGEGYTSDEEVLEVERNTL
NKNSEIFSSIKKLEKLFKNFDEYSSAGIFVKNGPAISTISKDIFGEWNVIRDKWNAEYDDIHLKKKAVVTEKYEDDR
RKSFKKIGSFSLEQLQEYADADLSVVEKLKEIIIQKVDEIYKVYGSSEKLFDADFVLEKSLKKNDAVVAIMKDLLDS
VKSFENYIKAFFGEGKETNRDESFYGDFVLAYDILLKVDHIYDAIRNYVTQKPYSKDKFKLYFQNPQFMGGWDKDKE
TDYRATILRYGSKYYLAIMDKKYAKCLQKIDKDDVNGNYEKINYKLLPGPNKMLPKVFFSKKWMAYYNPSEDIQKIY
KNGTFKKGDMFNLNDCHKLIDFFKDSISRYPKWSNAYDENFSETEKYKDIAGFYREVEEQGYKVSFESASKKEVDKL
VEEGKLYMFQIYNKDFSDKSHGTPNLHTMYFKLLFDENNHGQIRLSGGAELFMRRASLKKEELVVHPANSPIANKNP
DNPKKTTTLSYDVYKDKRFSEDQYLLHIPIAINKCPKNIFKINTEVRVLLKHDDNPYVIGIDRGERNLLYIVVVDGK
GNIVEQYSLNEIINNFNGIRIKTDYHSLLDKKEKERFEARQNWTSIENIKELKAGYISQVVHKICELVEKYDAVIAL
EDLNSGFKNSRVKVEKQVYQKFEKMLIDKLNYMVDKKSNPCATGGALKGYQITNKFESFKSMSTQNGFIFYIPAWLT
SKIDPSTGFVNLLKTKYTSIADSKKFISSFDRIMYVPEEDLFEFALDYKNFSRTDADYIKKWKLYSYGNRIRIFRNP
KKNNVFDWEEVCLTSAYKELFNKYGINYQQGDIRALLCEQSDKAFYSSFMALMSLMLQMRNSITGRTDVDFLISPVK
NSDGIFYDSRNYEAQENAILPKNADANGAYNIARKVLWAIGQFKKAEDEKLDKVKIAISNKEWLEYAQTSVKH
APAPAPAPAPAPAPAMVSKGEEDNMAIIKEFMRFKVHMEGSVNGHEFEIEGEGEGRPYEGTQTAKLKVTKGGPLPFA
WDILSPQFMYGSKAYVKHPADIPDYLKLSFPEGFKWERVMNFEDGGVVTVTQDSSLQDGEFIYKVKLRGTNFNFPSD
GPVMQKKTMGWEASSERMYPEDGALKGEIKQRLKLKDGGHYDEAVKTTYKAKKPVQLPGAYNVNIKLDITSHNEDYT
IVEQYEREAGRHSTGGMDELYK
SEQ ID NO: 288
MSKLEKFTNCYSLSKTLRFKAIPVGKTQENIDNKRLLVEDEKRAEDYKGVKKLLDRYYLSFINDVLHSIKLKNLNNY
ISLFRKKTRTEKENKELENLEINLRKEIAKAFKGNEGYKSLFKKDIIETILPEFLDDKDEIALVNSFNGFTTAFTGF
FDNRENMFSEEAKSTSIAFRCINENLTRYISNMDIFEKVDAIFDKHEVQEIKEKILNSDYDVEDFFEGEFFNFVLTQ
EGIDVYNAIIGGFVTESGEKIKGLNEYINLYNQKTKQKLPKFKPLYKQVLSDRESLSFYGEGYTSDEEVLEVFRNTL
NKNSEIFSSIKKLEKLFKNFDEYSSAGIFVKNGPAISTISKDIFGEWNVIRDKWNAEYDDIHLKKKAVVTEKYEDDR
RKSFKKIGSFSLEQLQEYADADLSVVEKLKEIIIQKVDEIYKVYGSSEKLFDADFVLEKSLKKNDAVVAIMKDLLDS
VKSFENYIKAFFGEGKETNRDESFYGDFVLAYDILLKVDHIYDAIRNYVTQKPYSKDKFKLYFQNPQFMGGWDKDKE
TDYRATILRYGSKYYLAIMDKKYAKCLQKIDKDDVNGNYEKINYKLLPGPNKMLPKVFFSKKWMAYYNPSEDIQKIY
KNGTFKKGDMFNLNDCHKLIDFFKDSISRYPKWSNAYDENFSETEKYKDIAGFYREVEEQGYKVSFESASKKEVDKL
VEEGKLYMFQIYNKDFSDKSHGTPNLHTMYFKLLFDENNHGQIRLSGGAELFMRRASLKKEELVVHPANSPIANKNP
DNPKKTTTLSYDVYKDKRESEDQYLLHIPIAINKCPKNIFKINTEVRVLLKHDDNPYVIGIDRGERNLLYIVVVDGK
GNIVEQYSLNEIINNFNGIRIKTDYHSLLDKKEKERFEARQNWTSIENIKELKAGYISQVVHKICELVEKYDAVIAL
EDLNSGFKNSRVKVEKQVYQKFEKMLIDKLNYMVDKKSNPCATGGALKGYQITNKFESFKSMSTQNGFIFYIPAWLT
SKIDPSTGFVNLLKTKYTSIADSKKFISSFDRIMYVPEEDLFEFALDYKNFSRTDADYIKKWKLYSYGNRIRIFRNP
KKNNVFDWEEVCLTSAYKELENKYGINYQQGDIRALLCEQSDKAFYSSFMALMSLMLQMRNSITGRTDVDFLISPVK
NSDGIFYDSRNYEAQENAILPKNADANGAYNIARKVLWAIGQFKKAEDEKLDKVKIAISNKEWLEYAQTSVKH
APAPAPAPAPAPAPAPAMVSKGEEDNMAIIKEFMRFKVHMEGSVNGHEFEIEGEGEGRPYEGTQTAKLKVTKGGPLP
FAWDILSPQFMYGSKAYVKHPADIPDYLKLSFPEGFKWERVMNFEDGGVVTVTQDSSLQDGEFIYKVKLRGTNFNFP
SDGPVMQKKTMGWEASSERMYPEDGALKGEIKQRLKLKDGGHYDEAVKTTYKAKKPVQLPGAYNVNIKLDITSHNED
YTIVEQYEREAGRHSTGGMDELYK
SEQ ID NO: 289
MSKLEKFTNCYSLSKTLRFKAIPVGKTQENIDNKRLLVEDEKRAEDYKGVKKLLDRYYLSFINDVLHSIKLKNLNNY
ISLFRKKTRTEKENKELENLEINLRKEIAKAFKGNEGYKSLFKKDIIETILPEFLDDKDEIALVNSENGETTAFTGF
FDNRENMESEEAKSTSIAFRCINENLTRYISNMDIFEKVDAIFDKHEVQEIKEKILNSDYDVEDFFEGEFFNFVLTQ
EGIDVYNAIIGGFVTESGEKIKGLNEYINLYNQKTKQKLPKFKPLYKQVLSDRESLSFYGEGYTSDEEVLEVFRNTL
NKNSEIFSSIKKLEKLFKNFDEYSSAGIFVKNGPAISTISKDIFGEWNVIRDKWNAEYDDIHLKKKAVVTEKYEDDR
RKSFKKIGSFSLEQLQEYADADLSVVEKLKEIIIQKVDEIYKVYGSSEKLFDADFVLEKSLKKNDAVVAIMKDLLDS
VKSFENYIKAFFGEGKETNRDESFYGDFVLAYDILLKVDHIYDAIRNYVTQKPYSKDKFKLYFQNPQFMGGWDKDKE
TDYRATILRYGSKYYLAIMDKKYAKCLQKIDKDDVNGNYEKINYKLLPGPNKMLPKVFFSKKWMAYYNPSEDIQKIY
KNGTFKKGDMFNLNDCHKLIDFFKDSISRYPKWSNAYDFNFSETEKYKDIAGFYREVEEQGYKVSFESASKKEVDKL
VEEGKLYMFQIYNKDFSDKSHGTPNLHTMYFKLLFDENNHGQIRLSGGAELFMRRASLKKEELVVHPANSPIANKNP
DNPKKITTLSYDVYKDKRFSEDQYLLHIPIAINKCPKNIFKINTEVRVLLKHDDNPYVIGIDRGERNLLYIVVVDGK
GNIVEQYSLNEIINNFNGIRIKTDYHSLLDKKEKERFEARQNWTSIENIKELKAGYISQVVHKICELVEKYDAVIAL
EDLNSGFKNSRVKVEKQVYQKFEKMLIDKLNYMVDKKSNPCATGGALKGYQITNKFESFKSMSTQNGFIFYIPAWLT
SKIDPSTGFVNLLKTKYTSIADSKKFISSFDRIMYVPEEDLFEFALDYKNFSRTDADYIKKWKLYSYGNRIRIFRNP
KKNNVFDWEEVCLTSAYKELFNKYGINYQQGDIRALLCEQSDKAFYSSFMALMSLMLQMRNSITGRTDVDFLISPVK
NSDGIFYDSRNYEAQENAILPKNADANGAYNIARKVLWAIGQFKKAEDEKLDKVKIAISNKEWLEYAQTSVKH
APAPAPAPAPAPAPAPAPAMVSKGEEDNMAIIKEFMRFKVHMEGSVNGHEFEIEGEGEGRPYEGTQTAKLKVTKGGP
LPFAWDILSPQFMYGSKAYVKHPADIPDYLKLSFPEGFKWERVMNFEDGGVVTVTQDSSLQDGEFIYKVKLRGTNFN
FPSDGPVMQKKTMGWEASSERMYPEDGALKGEIKQRLKLKDGGHYDEAVKTTYKAKKPVQLPGAYNVNIKLDITSHN
EDYTIVEQYEREAGRHSTGGMDELYK
SEQ ID NO: 290
MSKLEKFTNCYSLSKTLRFKAIPVGKTQENIDNKRLLVEDEKRAEDYKGVKKLLDRYYLSFINDVLHSIKLKNLNNY
ISLFRKKTRTEKENKELENLEINLRKEIAKAFKGNEGYKSLFKKDIIETILPEFLDDKDEIALVNSFNGFTTAFTGF
FDNRENMFSEEAKSTSIAFRCINENLTRYISNMDIFEKVDAIFDKHEVQEIKEKILNSDYDVEDFFEGEFFNEVLTQ
EGIDVYNAIIGGFVTESGEKIKGLNEYINLYNQKTKQKLPKFKPLYKQVLSDRESLSFYGEGYTSDEEVLEVFRNTL
NKNSEIFSSIKKLEKLFKNFDEYSSAGIFVKNGPAISTISKDIFGEWNVIRDKWNAEYDDIHLKKKAVVTEKYEDDR
RKSFKKIGSFSLEQLQEYADADLSVVEKLKEIIIQKVDEIYKVYGSSEKLFDADFVLEKSLKKNDAVVAIMKDLLDS
VKSFENYIKAFFGEGKETNRDESFYGDFVLAYDILLKVDHIYDAIRNYVTQKPYSKDKFKLYFQNPQFMGGWDKDKE
TDYRATILRYGSKYYLAIMDKKYAKCLQKIDKDDVNGNYEKINYKLLPGPNKMLPKVFFSKKWMAYYNPSEDIQKIY
KNGTFKKGDMFNLNDCHKLIDFFKDSISRYPKWSNAYDFNFSETEKYKDIAGFYREVEEQGYKVSFESASKKEVDKL
VEEGKLYMFQIYNKDFSDKSHGTPNLHTMYFKLLFDENNHGQIRLSGGAELFMRRASLKKEELVVHPANSPIANKNP
DNPKKITTLSYDVYKDKRFSEDQYLLHIPIAINKCPKNIFKINTEVRVLLKHDDNPYVIGIDRGERNLLYIVVVDGK
GNIVEQYSLNEIINNFNGIRIKTDYHSLLDKKEKERFEARQNWTSIENIKELKAGYISQVVHKICELVEKYDAVIAL
EDLNSGFKNSRVKVEKQVYQKFEKMLIDKLNYMVDKKSNPCATGGALKGYQITNKFESFKSMSTQNGFIFYIPAWLT
SKIDPSTGFVNLLKTKYTSIADSKKFISSFDRIMYVPEEDLFEFALDYKNFSRTDADYIKKWKLYSYGNRIRIFRNP
KKNNVFDWEEVCLTSAYKELFNKYGINYQQGDIRALLCEQSDKAFYSSFMALMSLMLQMRNSITGRTDVDFLISPVK
NSDGIFYDSRNYEAQENAILPKNADANGAYNIARKVLWAIGQFKKAEDEKLDKVKIAISNKEWLEYAQTSVKH
APAPAPAPAPAPAPAPAPAPAMVSKGEEDNMAIIKEFMRFKVHMEGSVNGHEFEIEGEGEGRPYEGTQTAKLKVTKG
GPLPFAWDILSPQFMYGSKAYVKHPADIPDYLKLSFPEGFKWERVMNFEDGGVVTVTQDSSLQDGEFIYKVKLRGTN
FNFPSDGPVMQKKTMGWEASSERMYPEDGALKGEIKQRLKLKDGGHYDEAVKTTYKAKKPVQLPGAYNVNIKLDITS
HNEDYTIVEQYEREAGRHSTGGMDELYK
SEQ ID NO: 291
MSKLEKFTNCYSLSKTLRFKAIPVGKTQENIDNKRLLVEDEKRAEDYKGVKKLLDRYYLSFINDVLHSIKLKNLNNY
ISLFRKKTRTEKENKELENLEINLRKEIAKAFKGNEGYKSLFKKDIIETILPEFLDDKDEIALVNSFNGFTTAFTGF
FDNRENMFSEEAKSTSIAFRCINENLTRYISNMDIFEKVDAIFDKHEVQEIKEKILNSDYDVEDFFEGEFFNEVLIQ
EGIDVYNAIIGGFVTESGEKIKGLNEYINLYNQKTKQKLPKFKPLYKQVLSDRESLSFYGEGYTSDEEVLEVFRNTL
NKNSEIFSSIKKLEKLFKNFDEYSSAGIFVKNGPAISTISKDIFGEWNVIRDKWNAEYDDIHLKKKAVVTEKYEDDR
RKSFKKIGSFSLEQLQEYADADLSVVEKLKEIIIQKVDEIYKVYGSSEKLFDADFVLEKSLKKNDAVVAIMKDLLDS
VKSFENYIKAFFGEGKETNRDESFYGDFVLAYDILLKVDHIYDAIRNYVTQKPYSKDKFKLYFQNPQFMGGWDKDKE
TDYRATILRYGSKYYLAIMDKKYAKCLQKIDKDDVNGNYEKINYKLLPGPNKMLPKVFFSKKWMAYYNPSEDIQKIY
KNGTFKKGDMFNLNDCHKLIDFFKDSISRYPKWSNAYDENFSETEKYKDIAGFYREVEEQGYKVSFESASKKEVDKL
VEEGKLYMFQIYNKDFSDKSHGTPNLHTMYFKLLFDENNHGQIRLSGGAELFMRRASLKKEELVVHPANSPIANKNP
DNPKKTTTLSYDVYKDKRFSEDQYLLHIPIAINKCPKNIFKINTEVRVLLKHDDNPYVIGIDRGERNLLYIVVVDGK
GNIVEQYSLNEIINNFNGIRIKTDYHSLLDKKEKERFEARQNWTSIENIKELKAGYISQVVHKICELVEKYDAVIAL
EDLNSGFKNSRVKVEKQVYQKFEKMLIDKLNYMVDKKSNPCATGGALKGYQITNKFESFKSMSTQNGFIFYIPAWLT
SKIDPSTGFVNLLKTKYTSIADSKKFISSFDRIMYVPEEDLFEFALDYKNFSRTDADYIKKWKLYSYGNRIRIFRNP
KKNNVFDWEEVCLTSAYKELFNKYGINYQQGDIRALLCEQSDKAFYSSFMALMSLMLQMRNSITGRTDVDFLISPVK
NSDGIFYDSRNYEAQENAILPKNADANGAYNIARKVLWAIGQFKKAEDEKLDKVKIAISNKEWLEYAQTSVKH
APAPAPAPAPAPAPAPAPAPAPAMVSKGEEDNMAIIKEFMRFKVHMEGSVNGHEFEIEGEGEGRPYEGTQTAKLKVT
KGGPLPFAWDILSPQFMYGSKAYVKHPADIPDYLKLSFPEGFKWERVMNFEDGGVVTVTQDSSLQDGEFIYKVKLRG
TNFNFPSDGPVMQKKTMGWEASSERMYPEDGALKGEIKQRLKLKDGGHYDEAVKTTYKAKKPVQLPGAYNVNIKLDI
TSHNEDYTIVEQYEREAGRHSTGGMDELYK
SEQ ID NO: 292
MSKLEKFTNCYSLSKTLRFKAIPVGKTQENIDNKRLLVEDEKRAEDYKGVKKLLDRYYLSFINDVLHSIKLKNLNNY
ISLFRKKTRTEKENKELENLEINLRKEIAKAFKGNEGYKSLFKKDIIETILPEFLDDKDEIALVNSENGETTAFTGE
FDNRENMFSEEAKSTSIAFRCINENLTRYISNMDIFEKVDAIFDKHEVQEIKEKILNSDYDVEDFFEGEFFNEVLIQ
EGIDVYNAIIGGFVTESGEKIKGLNEYINLYNQKTKQKLPKFKPLYKQVLSDRESLSFYGEGYTSDEEVLEVFRNTL
NKNSEIFSSIKKLEKLFKNFDEYSSAGIFVKNGPAISTISKDIFGEWNVIRDKWNAEYDDIHLKKKAVVTEKYEDDR
RKSFKKIGSFSLEQLQEYADADLSVVEKLKEIIIQKVDEIYKVYGSSEKLFDADFVLEKSLKKNDAVVAIMKDLLDS
VKSFENYIKAFFGEGKETNRDESFYGDFVLAYDILLKVDHIYDAIRNYVTQKPYSKDKFKLYFQNPQFMGGWDKDKE
TDYRATILRYGSKYYLAIMDKKYAKCLQKIDKDDVNGNYEKINYKLLPGPNKMLPKVFFSKKWMAYYNPSEDIQKIY
KNGTFKKGDMFNLNDCHKLIDFFKDSISRYPKWSNAYDFNFSETEKYKDIAGFYREVEEQGYKVSFESASKKEVDKL
VEEGKLYMFQIYNKDFSDKSHGTPNLHTMYFKLLFDENNHGQIRLSGGAELFMRRASLKKEELVVHPANSPIANKNP
DNPKKTTTLSYDVYKDKRFSEDQYLLHIPIAINKCPKNIFKINTEVRVLLKHDDNPYVIGIDRGERNLLYIVVVDGK
GNIVEQYSLNEIINNFNGIRIKTDYHSLLDKKEKERFEARQNWTSIENIKELKAGYISQVVHKICELVEKYDAVIAL
EDLNSGFKNSRVKVEKQVYQKFEKMLIDKLNYMVDKKSNPCATGGALKGYQITNKFESFKSMSTQNGFIFYIPAWLT
SKIDPSTGFVNLLKTKYTSIADSKKFISSFDRIMYVPEEDLFEFALDYKNFSRTDADYIKKWKLYSYGNRIRIFRNP
KKNNVFDWEEVCLTSAYKELFNKYGINYQQGDIRALLCEQSDKAFYSSFMALMSLMLQMRNSITGRTDVDFLISPVK
NSDGIFYDSRNYEAQENAILPKNADANGAYNIARKVLWAIGQFKKAEDEKLDKVKIAISNKEWLEYAQTSVKH
APAPAPAPAPAPAPAPAPAPAPAPAMVSKGEEDNMAIIKEFMRFKVHMEGSVNGHEFEIEGEGEGRPYEGTQTAKLK
VTKGGPLPFAWDILSPQFMYGSKAYVKHPADIPDYLKLSFPEGFKWERVMNFEDGGVVTVTQDSSLQDGEFIYKVKL
RGTNFNFPSDGPVMQKKTMGWEASSERMYPEDGALKGEIKQRLKLKDGGHYDEAVKTTYKAKKPVQLPGAYNVNIKL
DITSHNEDYTIVEQYEREAGRHSTGGMDELYK
SEQ ID NO: 293
MSKLEKFTNCYSLSKTLRFKAIPVGKTQENIDNKRLLVEDEKRAEDYKGVKKLLDRYYLSFINDVLHSIKLKNLNNY
ISLFRKKTRTEKENKELENLEINLRKEIAKAFKGNEGYKSLFKKDIIETILPEFLDDKDEIALVNSFNGETTAFTGF
FDNRENMFSEEAKSTSIAFRCINENLTRYISNMDIFEKVDAIFDKHEVQEIKEKILNSDYDVEDFFEGEFFNFVLTQ
EGIDVYNAIIGGFVTESGEKIKGLNEYINLYNQKTKQKLPKFKPLYKQVLSDRESLSFYGEGYTSDEEVLEVFRNTL
NKNSEIFSSIKKLEKLFKNFDEYSSAGIFVKNGPAISTISKDIFGEWNVIRDKWNAEYDDIHLKKKAVVTEKYEDDR
RKSFENYIKAFFGEGKETNRDESFYGDFVLAYDILLKVDHIYDAIRNYVTQKPYSKDKFKLYFQNPQFMGGWDKDKE
TDYRATILRYGSKYYLAIMDKKYAKCLQKIDKDDVNGNYEKINYKLLPGPNKMLPKVFFSKKWMAYYNPSEDIQKIY
KNGTFKKGDMFNLNDCHKLIDFFKDSISRYPKWSNAYDFNFSETEKYKDIAGFYREVEEQGYKVSFESASKKEVDKL
VEEGKLYMFQIYNKDFSDKSHGTPNLHTMYFKLLFDENNHGQIRLSGGAELFMRRASLKKEELVVHPANSPIANKNP
DNPKKTTTLSYDVYKDKRFSEDQYLLHIPIAINKCPKNIFKINTEVRVLLKHDDNPYVIGIDRGERNLLYIVVVDGK
GNIVEQYSLNEIINNFNGIRIKTDYHSLLDKKEKERFEARQNWTSIENIKELKAGYISQVVHKICELVEKYDAVIAL
EDLNSGFKNSRVKVEKQVYQKFEKMLIDKLNYMVDKKSNPCATGGALKGYQITNKFESFKSMSTQNGFIFYIPAWLT
SKIDPSTGFVNLLKTKYTSIADSKKFISSFDRIMYVPEEDLFEFALDYKNFSRTDADYIKKWKLYSYGNRIRIFRNP
KKNNVFDWEEVCLTSAYKELFNKYGINYQQGDIRALLCEQSDKAFYSSFMALMSLMLQMRNSITGRTDVDFLISPVK
NSDGIFYDSRNYEAQENAILPKNADANGAYNIARKVLWAIGQFKKAEDEKLDKVKIAISNKEWLEYAQTSVKH
APAPAPAPAPAPAPAPAPAPAPAPAPAMVSKGEEDNMAIIKEFMRFKVHMEGSVNGHEFEIEGEGEGRPYEGTQTAK
LKVTKGGPLPFAWDILSPQFMYGSKAYVKHPADIPDYLKLSFPEGFKWERVMNFEDGGVVTVTQDSSLQDGEFIYKV
KLRGTNFNFPSDGPVMQKKTMGWEASSERMYPEDGALKGEIKQRLKLKDGGHYDEAVKTTYKAKKPVQLPGAYNVNI
KLDITSHNEDYTIVEQYEREAGRHSTGGMDELYK
SEQ ID NO: 294
MSKLEKFTNCYSLSKTLRFKAIPVGKTQENIDNKRLLVEDEKRAEDYKGVKKLLDRYYLSFINDVLHSIKLKNLNNY
ISLFRKKTRTEKENKELENLEINLRKEIAKAFKGNEGYKSLFKKDIIETILPEFLDDKDEIALVNSENGETTAFTGE
FDNRENMESEEAKSTSIAFRCINENLTRYISNMDIFEKVDAIFDKHEVQEIKEKILNSDYDVEDFFEGEFFNFVLTQ
EGIDVYNAIIGGFVTESGEKIKGLNEYINLYNQKTKQKLPKFKPLYKQVLSDRESLSFYGEGYTSDEEVLEVFRNTL
NKNSEIFSSIKKLEKLFKNFDEYSSAGIFVKNGPAISTISKDIFGEWNVIRDKWNAEYDDIHLKKKAVVTEKYEDDR
RKSFKKIGSFSLEQLQEYADADLSVVEKLKEIIIQKVDEIYKVYGSSEKLFDADFVLEKSLKKNDAVVAIMKDLLDS
VKSFENYIKAFFGEGKETNRDESFYGDFVLAYDILLKVDHIYDAIRNYVTQKPYSKDKFKLYFQNPQFMGGWDKDKE
TDYRATILRYGSKYYLAIMDKKYAKCLQKIDKDDVNGNYEKINYKLLPGPNKMLPKVFFSKKWMAYYNPSEDIQKIY
KNGTFKKGDMFNLNDCHKLIDFFKDSISRYPKWSNAYDENFSETEKYKDIAGFYREVEEQGYKVSFESASKKEVDKL
VEEGKLYMFQIYNKDFSDKSHGTPNLHTMYFKLLFDENNHGQIRLSGGAELFMRRASLKKEELVVHPANSPIANKNP
DNPKKTTTLSYDVYKDKRFSEDQYLLHIPIAINKCPKNIFKINTEVRVLLKHDDNPYVIGIDRGERNLLYIVVVDGK
GNIVEQYSLNEIINNFNGIRIKTDYHSLLDKKEKERFEARQNWTSIENIKELKAGYISQVVHKICELVEKYDAVIAL
EDLNSGFKNSRVKVEKQVYQKFEKMLIDKLNYMVDKKSNPCATGGALKGYQITNKFESFKSMSTQNGFIFYIPAWLT
SKIDPSTGFVNLLKTKYTSIADSKKFISSFDRIMYVPEEDLFEFALDYKNFSRTDADYIKKWKLYSYGNRIRIFRNP
KKNNVFDWEEVCLTSAYKELFNKYGINYQQGDIRALLCEQSDKAFYSSFMALMSLMLQMRNSITGRTDVDFLISPVK
NSDGIFYDSRNYEAQENAILPKNADANGAYNIARKVLWAIGQFKKAEDEKLDKVKIAISNKEWLEYAQTSVKH
APAPAPAPAPAPAPAPAPAPAPAPAPAPAMVSKGEEDNMAIIKEFMRFKVHMEGSVNGHEFEIEGEGEGRPYEGTQT
AKLKVTKGGPLPFAWDILSPQFMYGSKAYVKHPADIPDYLKLSFPEGFKWERVMNFEDGGVVTVTQDSSLQDGEFIY
KVKLRGTNFNFPSDGPVMQKKTMGWEASSERMYPEDGALKGEIKQRLKLKDGGHYDEAVKTTYKAKKPVQLPGAYNV
NIKLDITSHNEDYTIVEQYEREAGRHSTGGMDELYK
SEQ ID NO: 295
MSKLEKFTNCYSLSKTLRFKAIPVGKTQENIDNKRLLVEDEKRAEDYKGVKKLLDRYYLSFINDVLHSIKLKNLNNY
ISLFRKKTRTEKENKELENLEINLRKEIAKAFKGNEGYKSLFKKDIIETILPEFLDDKDEIALVNSFNGFTTAFTGF
FDNRENMFSEEAKSTSIAFRCINENLTRYISNMDIFEKVDAIFDKHEVQEIKEKILNSDYDVEDFFEGEFFNEVLIQ
EGIDVYNAIIGGFVTESGEKIKGLNEYINLYNQKTKQKLPKFKPLYKQVLSDRESLSFYGEGYTSDEEVLEVFRNTL
NKNSEIFSSIKKLEKLFKNFDEYSSAGIFVKNGPAISTISKDIFGEWNVIRDKWNAEYDDIHLKKKAVVTEKYEDDR
RKSFKKIGSFSLEQLQEYADADLSVVEKLKEIIIQKVDEIYKVYGSSEKLFDADFVLEKSLKKNDAVVAIMKDLLDS
VKSFENYIKAFFGEGKETNRDESFYGDFVLAYDILLKVDHIYDAIRNYVTQKPYSKDKFKLYFQNPQFMGGWDKDKE
TDYRATILRYGSKYYLAIMDKKYAKCLQKIDKDDVNGNYEKINYKLLPGPNKMLPKVFFSKKWMAYYNPSEDIQKIY
KNGTFKKGDMFNLNDCHKLIDFFKDSISRYPKWSNAYDFNFSETEKYKDIAGFYREVEEQGYKVSFESASKKEVDKL
VEEGKLYMFQIYNKDFSDKSHGTPNLHTMYFKLLFDENNHGQIRLSGGAELFMRRASLKKEELVVHPANSPIANKNP
DNPKKITTLSYDVYKDKRFSEDQYLLHIPIAINKCPKNIFKINTEVRVLLKHDDNPYVIGIDRGERNLLYIVVVDGK
GNIVEQYSLNEIINNFNGIRIKTDYHSLLDKKEKERFEARQNWTSIENIKELKAGYISQVVHKICELVEKYDAVIAL
EDLNSGFKNSRVKVEKQVYQKFEKMLIDKLNYMVDKKSNPCATGGALKGYQITNKFESFKSMSTQNGFIFYIPAWLT
SKIDPSTGFVNLLKTKYTSIADSKKFISSFDRIMYVPEEDLFEFALDYKNFSRTDADYIKKWKLYSYGNRIRIFRNP
KKNNVFDWEEVCLTSAYKELFNKYGINYQQGDIRALLCEQSDKAFYSSFMALMSLMLQMRNSITGRTDVDFLISPVK
NSDGIFYDSRNYEAQENAILPKNADANGAYNIARKVLWAIGQFKKAEDEKLDKVKIAISNKEWLEYAQTSVKH
XPMVSKGEEDNMAIIKEFMRFKVHMEGSVNGHEFEIEGEGEGRPYEGTQTAKLKVTKGGPLPFAWDILSPQFMYGSK
AYVKHPADIPDYLKLSFPEGFKWERVMNFEDGGVVTVTQDSSLQDGEFIYKVKLRGTNFNFPSDGPVMQKKTMGWEA
SSERMYPEDGALKGEIKQRLKLKDGGHYDEAVKTTYKAKKPVQLPGAYNVNIKLDITSHNEDYTIVEQYEREAGRHS
TGGMDELYK
SEQ ID NO: 296
MSKLEKFTNCYSLSKTLRFKAIPVGKTQENIDNKRLLVEDEKRAEDYKGVKKLLDRYYLSFINDVLHSIKLKNLNNY
ISLFRKKTRTEKENKELENLEINLRKEIAKAFKGNEGYKSLFKKDIIETILPEFLDDKDEIALVNSENGETTAFTGF
FDNRENMESEEAKSTSIAFRCINENLTRYISNMDIFEKVDAIFDKHEVQEIKEKILNSDYDVEDFFEGEFFNFVLTQ
EGIDVYNAIIGGFVTESGEKIKGLNEYINLYNQKTKQKLPKFKPLYKQVLSDRESLSFYGEGYTSDEEVLEVERNTL
NKNSEIFSSIKKLEKLFKNFDEYSSAGIFVKNGPAISTISKDIFGEWNVIRDKWNAEYDDIHLKKKAVVTEKYEDDR
RKSFKKIGSFSLEQLQEYADADLSVVEKLKEIIIQKVDEIYKVYGSSEKLFDADFVLEKSLKKNDAVVAIMKDLLDS
VKSFENYIKAFFGEGKETNRDESFYGDFVLAYDILLKVDHIYDAIRNYVTQKPYSKDKFKLYFQNPQFMGGWDKDKE
TDYRATILRYGSKYYLAIMDKKYAKCLQKIDKDDVNGNYEKINYKLLPGPNKMLPKVFFSKKWMAYYNPSEDIQKIY
KNGTFKKGDMFNLNDCHKLIDFFKDSISRYPKWSNAYDENFSETEKYKDIAGFYREVEEQGYKVSFESASKKEVDKL
VEEGKLYMFQIYNKDFSDKSHGTPNLHTMYFKLLFDENNHGQIRLSGGAELFMRRASLKKEELVVHPANSPIANKNP
DNPKKITTLSYDVYKDKRFSEDQYLLHIPIAINKCPKNIFKINTEVRVLLKHDDNPYVIGIDRGERNLLYIVVVDGK
GNIVEQYSLNEIINNFNGIRIKTDYHSLLDKKEKERFEARQNWTSIENIKELKAGYISQVVHKICELVEKYDAVIAL
EDLNSGFKNSRVKVEKQVYQKFEKMLIDKLNYMVDKKSNPCATGGALKGYQITNKFESFKSMSTQNGFIFYIPAWLT
SKIDPSTGFVNLLKTKYTSIADSKKFISSFDRIMYVPEEDLFEFALDYKNFSRTDADYIKKWKLYSYGNRIRIFRNP
KKNNVFDWEEVCLTSAYKELFNKYGINYQQGDIRALLCEQSDKAFYSSFMALMSLMLQMRNSITGRTDVDFLISPVK
NSDGIFYDSRNYEAQENAILPKNADANGAYNIARKVLWAIGQFKKAEDEKLDKVKIAISNKEWLEYAQTSVKH
XPXPMVSKGEEDNMAIIKEFMRFKVHMEGSVNGHEFEIEGEGEGRPYEGTQTAKLKVTKGGPLPFAWDILSPQFMYG
SKAYVKHPADIPDYLKLSFPEGFKWERVMNFEDGGVVTVTQDSSLQDGEFIYKVKLRGTNFNFPSDGPVMQKKTMGW
EASSERMYPEDGALKGEIKQRLKLKDGGHYDEAVKTTYKAKKPVQLPGAYNVNIKLDITSHNEDYTIVEQYEREAGR
HSTGGMDELYK
SEQ ID NO: 297
MSKLEKFTNCYSLSKTLRFKAIPVGKTQENIDNKRLLVEDEKRAEDYKGVKKLLDRYYLSFINDVLHSIKLKNLNNY
ISLFRKKTRTEKENKELENLEINLRKEIAKAFKGNEGYKSLFKKDIIETILPEFLDDKDEIALVNSFNGFTTAFTGF
FDNRENMFSEEAKSTSIAFRCINENLTRYISNMDIFEKVDAIFDKHEVQEIKEKILNSDYDVEDFFEGEFFNEVLTQ
EGIDVYNAIIGGFVTESGEKIKGLNEYINLYNQKTKQKLPKFKPLYKQVLSDRESLSFYGEGYTSDEEVLEVERNTL
NKNSEIFSSIKKLEKLFKNFDEYSSAGIFVKNGPAISTISKDIFGEWNVIRDKWNAEYDDIHLKKKAVVTEKYEDDR
RKSFKKIGSFSLEQLQEYADADLSVVEKLKEIIIQKVDEIYKVYGSSEKLFDADFVLEKSLKKNDAVVAIMKDLLDS
VKSFENYIKAFFGEGKETNRDESFYGDFVLAYDILLKVDHIYDAIRNYVTQKPYSKDKFKLYFQNPQFMGGWDKDKE
TDYRATILRYGSKYYLAIMDKKYAKCLQKIDKDDVNGNYEKINYKLLPGPNKMLPKVFFSKKWMAYYNPSEDIQKIY
KNGTFKKGDMFNLNDCHKLIDFFKDSISRYPKWSNAYDFNFSETEKYKDIAGFYREVEEQGYKVSFESASKKEVDKL
VEEGKLYMFQIYNKDFSDKSHGTPNLHTMYFKLLFDENNHGQIRLSGGAELFMRRASLKKEELVVHPANSPIANKNP
DNPKKITTLSYDVYKDKRFSEDQYLLHIPIAINKCPKNIFKINTEVRVLLKHDDNPYVIGIDRGERNLLYIVVVDGK
GNIVEQYSLNEIINNFNGIRIKTDYHSLLDKKEKERFEARQNWTSIENIKELKAGYISQVVHKICELVEKYDAVIAL
EDLNSGFKNSRVKVEKQVYQKFEKMLIDKLNYMVDKKSNPCATGGALKGYQITNKFESFKSMSTQNGFIFYIPAWLT
SKIDPSTGFVNLLKTKYTSIADSKKFISSFDRIMYVPEEDLFEFALDYKNFSRTDADYIKKWKLYSYGNRIRIFRNP
KKNNVFDWEEVCLTSAYKELFNKYGINYQQGDIRALLCEQSDKAFYSSFMALMSLMLQMRNSITGRTDVDFLISPVK
NSDGIFYDSRNYEAQENAILPKNADANGAYNIARKVLWAIGQFKKAEDEKLDKVKIAISNKEWLEYAQTSVKH
XPXPXPMVSKGEEDNMAIIKEFMRFKVHMEGSVNGHEFEIEGEGEGRPYEGTQTAKLKVTKGGPLPFAWDILSPQFM
YGSKAYVKHPADIPDYLKLSFPEGFKWERVMNFEDGGVVTVTQDSSLQDGEFIYKVKLRGTNFNFPSDGPVMQKKTM
GWEASSERMYPEDGALKGEIKQRLKLKDGGHYDEAVKTTYKAKKPVQLPGAYNVNIKLDITSHNEDYTIVEQYEREA
GRHSTGGMDELYK
SEQ ID NO: 298
MSKLEKFTNCYSLSKTLRFKAIPVGKTQENIDNKRLLVEDEKRAEDYKGVKKLLDRYYLSFINDVLHSIKLKNLNNY
ISLFRKKTRTEKENKELENLEINLRKEIAKAFKGNEGYKSLFKKDIIETILPEFLDDKDEIALVNSENGETTAFTGF
FDNRENMFSEEAKSTSIAFRCINENLTRYISNMDIFEKVDAIFDKHEVQEIKEKILNSDYDVEDFFEGEFFNFVLTQ
EGIDVYNAIIGGFVTESGEKIKGLNEYINLYNQKTKQKLPKFKPLYKQVLSDRESLSFYGEGYTSDEEVLEVFRNTL
NKNSEIFSSIKKLEKLFKNFDEYSSAGIFVKNGPAISTISKDIFGEWNVIRDKWNAEYDDIHLKKKAVVTEKYEDDR
RKSFKKIGSFSLEQLQEYADADLSVVEKLKEIIIQKVDEIYKVYGSSEKLFDADFVLEKSLKKNDAVVAIMKDLLDS
VKSFENYIKAFFGEGKETNRDESFYGDFVLAYDILLKVDHIYDAIRNYVTQKPYSKDKFKLYFQNPQFMGGWDKDKE
TDYRATILRYGSKYYLAIMDKKYAKCLQKIDKDDVNGNYEKINYKLLPGPNKMLPKVFFSKKWMAYYNPSEDIQKIY
KNGTFKKGDMFNLNDCHKLIDFFKDSISRYPKWSNAYDFNFSETEKYKDIAGFYREVEEQGYKVSFESASKKEVDKL
VEEGKLYMFQIYNKDFSDKSHGTPNLHTMYFKLLFDENNHGQIRLSGGAELFMRRASLKKEELVVHPANSPIANKNP
DNPKKTTTLSYDVYKDKRESEDQYLLHIPIAINKCPKNIFKINTEVRVLLKHDDNPYVIGIDRGERNLLYIVVVDGK
GNIVEQYSLNEIINNFNGIRIKTDYHSLLDKKEKERFEARQNWTSIENIKELKAGYISQVVHKICELVEKYDAVIAL
EDLNSGFKNSRVKVEKQVYQKFEKMLIDKLNYMVDKKSNPCATGGALKGYQITNKFESFKSMSTQNGFIFYIPAWLT
SKIDPSTGFVNLLKTKYTSIADSKKFISSFDRIMYVPEEDLFEFALDYKNFSRTDADYIKKWKLYSYGNRIRIFRNP
KKNNVFDWEEVCLTSAYKELFNKYGINYQQGDIRALLCEQSDKAFYSSFMALMSLMLQMRNSITGRTDVDFLISPVK
NSDGIFYDSRNYEAQENAILPKNADANGAYNIARKVLWAIGQFKKAEDEKLDKVKIAISNKEWLEYAQTSVKH
XPXPXPXPMVSKGEEDNMAIIKEFMRFKVHMEGSVNGHEFEIEGEGEGRPYEGTQTAKLKVTKGGPLPFAWDILSPQ
FMYGSKAYVKHPADIPDYLKLSFPEGFKWERVMNFEDGGVVTVTQDSSLQDGEFIYKVKLRGTNFNFPSDGPVMQKK
TMGWEASSERMYPEDGALKGEIKQRLKLKDGGHYDEAVKTTYKAKKPVQLPGAYNVNIKLDITSHNEDYTIVEQYER
EAGRHSTGGMDELYK
SEQ ID NO: 299
MSKLEKFTNCYSLSKTLRFKAIPVGKTQENIDNKRLLVEDEKRAEDYKGVKKLLDRYYLSFINDVLHSIKLKNLNNY
ISLFRKKTRTEKENKELENLEINLRKEIAKAFKGNEGYKSLFKKDIIETILPEFLDDKDEIALVNSFNGFTTAFTGF
FDNRENMFSEEAKSTSIAFRCINENLTRYISNMDIFEKVDAIFDKHEVQEIKEKILNSDYDVEDFFEGEFFNFVLTQ
EGIDVYNAIIGGFVTESGEKIKGLNEYINLYNQKTKQKLPKFKPLYKQVLSDRESLSFYGEGYTSDEEVLEVERNTL
NKNSEIFSSIKKLEKLFKNFDEYSSAGIFVKNGPAISTISKDIFGEWNVIRDKWNAEYDDIHLKKKAVVTEKYEDDR
RKSFKKIGSFSLEQLQEYADADLSVVEKLKEIIIQKVDEIYKVYGSSEKLFDADFVLEKSLKKNDAVVAIMKDLLDS
VKSFENYIKAFFGEGKETNRDESFYGDFVLAYDILLKVDHIYDAIRNYVTQKPYSKDKFKLYFQNPQFMGGWDKDKE
TDYRATILRYGSKYYLAIMDKKYAKCLQKIDKDDVNGNYEKINYKLLPGPNKMLPKVFFSKKWMAYYNPSEDIQKIY
KNGTFKKGDMFNLNDCHKLIDFFKDSISRYPKWSNAYDFNFSETEKYKDIAGFYREVEEQGYKVSFESASKKEVDKL
VEEGKLYMFQIYNKDFSDKSHGTPNLHTMYFKLLFDENNHGQIRLSGGAELFMRRASLKKEELVVHPANSPIANKNP
DNPKKITTLSYDVYKDKRESEDQYLLHIPIAINKCPKNIFKINTEVRVLLKHDDNPYVIGIDRGERNLLYIVVVDGK
GNIVEQYSLNEIINNFNGIRIKTDYHSLLDKKEKERFEARQNWTSIENIKELKAGYISQVVHKICELVEKYDAVIAL
EDLNSGFKNSRVKVEKQVYQKFEKMLIDKLNYMVDKKSNPCATGGALKGYQITNKFESFKSMSTQNGFIFYIPAWLT
SKIDPSTGFVNLLKTKYTSIADSKKFISSFDRIMYVPEEDLFEFALDYKNFSRTDADYIKKWKLYSYGNRIRIFRNP
KKNNVFDWEEVCLTSAYKELFNKYGINYQQGDIRALLCEQSDKAFYSSFMALMSLMLQMRNSITGRTDVDFLISPVK
NSDGIFYDSRNYEAQENAILPKNADANGAYNIARKVLWAIGQFKKAEDEKLDKVKIAISNKEWLEYAQTSVKH
XPXPXPXPXPMVSKGEEDNMAIIKEFMRFKVHMEGSVNGHEFEIEGEGEGRPYEGTQTAKLKVTKGGPLPFAWDILS
PQFMYGSKAYVKHPADIPDYLKLSFPEGFKWERVMNFEDGGVVTVTQDSSLQDGEFIYKVKLRGTNFNFPSDGPVMQ
KKTMGWEASSERMYPEDGALKGEIKQRLKLKDGGHYDEAVKTTYKAKKPVQLPGAYNVNIKLDITSHNEDYTIVEQY
EREAGRHSTGGMDELYK
SEQ ID NO: 300
MSKLEKFTNCYSLSKTLRFKAIPVGKTQENIDNKRLLVEDEKRAEDYKGVKKLLDRYYLSFINDVLHSIKLKNLNNY
ISLFRKKTRTEKENKELENLEINLRKEIAKAFKGNEGYKSLFKKDIIETILPEFLDDKDEIALVNSFNGFTTAFTGF
FDNRENMESEEAKSTSIAFRCINENLTRYISNMDIFEKVDAIFDKHEVQEIKEKILNSDYDVEDFFEGEFFNFVLTQ
EGIDVYNAIIGGFVTESGEKIKGLNEYINLYNQKTKQKLPKFKPLYKQVLSDRESLSFYGEGYTSDEEVLEVERNTL
NKNSEIFSSIKKLEKLFKNFDEYSSAGIFVKNGPAISTISKDIFGEWNVIRDKWNAEYDDIHLKKKAVVTEKYEDDR
RKSFKKIGSFSLEQLQEYADADLSVVEKLKEIIIQKVDEIYKVYGSSEKLFDADFVLEKSLKKNDAVVAIMKDLLDS
VKSFENYIKAFFGEGKETNRDESFYGDFVLAYDILLKVDHIYDAIRNYVTQKPYSKDKFKLYFQNPQFMGGWDKDKE
TDYRATILRYGSKYYLAIMDKKYAKCLQKIDKDDVNGNYEKINYKLLPGPNKMLPKVFFSKKWMAYYNPSEDIQKIY
KNGTFKKGDMFNLNDCHKLIDFFKDSISRYPKWSNAYDENFSETEKYKDIAGFYREVEEQGYKVSFESASKKEVDKL
VEEGKLYMFQIYNKDFSDKSHGTPNLHTMYFKLLFDENNHGQIRLSGGAELFMRRASLKKEELVVHPANSPIANKNP
DNPKKITTLSYDVYKDKRESEDQYLLHIPIAINKCPKNIFKINTEVRVLLKHDDNPYVIGIDRGERNLLYIVVVDGK
GNIVEQYSLNEIINNFNGIRIKTDYHSLLDKKEKERFEARQNWTSIENIKELKAGYISQVVHKICELVEKYDAVIAL
EDLNSGFKNSRVKVEKQVYQKFEKMLIDKLNYMVDKKSNPCATGGALKGYQITNKFESFKSMSTQNGFIFYIPAWLT
SKIDPSTGFVNLLKTKYTSIADSKKFISSFDRIMYVPEEDLFEFALDYKNFSRTDADYIKKWKLYSYGNRIRIFRNP
KKNNVFDWEEVCLTSAYKELFNKYGINYQQGDIRALLCEQSDKAFYSSFMALMSLMLQMRNSITGRTDVDFLISPVK
NSDGIFYDSRNYEAQENAILPKNADANGAYNIARKVLWAIGQFKKAEDEKLDKVKIAISNKEWLEYAQTSVKH
XPXPXPXPXPXMVSKGEEDNMAIIKEFMRFKVHMEGSVNGHEFEIEGEGEGRPYEGTQTAKLKVTKGGPLPFAWDIL
SPQFMYGSKAYVKHPADIPDYLKLSFPEGFKWERVMNFEDGGVVTVTQDSSLQDGEFIYKVKLRGTNFNFPSDGPVM
QKKTMGWEASSERMYPEDGALKGEIKQRLKLKDGGHYDEAVKTTYKAKKPVQLPGAYNVNIKLDITSHNEDYTIVEQ
YEREAGRHSTGGMDELYK
SEQ ID NO: 301
MSKLEKFTNCYSLSKTLRFKAIPVGKTQENIDNKRLLVEDEKRAEDYKGVKKLLDRYYLSFINDVLHSIKLKNLNNY
ISLFRKKTRTEKENKELENLEINLRKEIAKAFKGNEGYKSLFKKDIIETILPEFLDDKDEIALVNSFNGETTAFTGF
FDNRENMFSEEAKSTSIAFRCINENLTRYISNMDIFEKVDAIFDKHEVQEIKEKILNSDYDVEDFFEGEFFNEVLTQ
EGIDVYNAIIGGFVTESGEKIKGLNEYINLYNQKTKQKLPKFKPLYKQVLSDRESLSFYGEGYTSDEEVLEVERNTL
NKNSEIFSSIKKLEKLFKNFDEYSSAGIFVKNGPAISTISKDIFGEWNVIRDKWNAEYDDIHLKKKAVVTEKYEDDR
RKSFKKIGSFSLEQLQEYADADLSVVEKLKEIIIQKVDEIYKVYGSSEKLFDADFVLEKSLKKNDAVVAIMKDLLDS
VKSFENYIKAFFGEGKETNRDESFYGDFVLAYDILLKVDHIYDAIRNYVTQKPYSKDKFKLYFQNPQFMGGWDKDKE
TDYRATILRYGSKYYLAIMDKKYAKCLQKIDKDDVNGNYEKINYKLLPGPNKMLPKVFFSKKWMAYYNPSEDIQKIY
KNGTFKKGDMFNLNDCHKLIDFFKDSISRYPKWSNAYDENFSETEKYKDIAGFYREVEEQGYKVSFESASKKEVDKL
VEEGKLYMFQIYNKDFSDKSHGTPNLHTMYFKLLFDENNHGQIRLSGGAELFMRRASLKKEELVVHPANSPIANKNP
DNPKKITTLSYDVYKDKRESEDQYLLHIPIAINKCPKNIFKINTEVRVLLKHDDNPYVIGIDRGERNLLYIVVVDGK
GNIVEQYSLNEIINNFNGIRIKTDYHSLLDKKEKERFEARQNWTSIENIKELKAGYISQVVHKICELVEKYDAVIAL
EDLNSGFKNSRVKVEKQVYQKFEKMLIDKLNYMVDKKSNPCATGGALKGYQITNKFESFKSMSTQNGFIFYIPAWLT
SKIDPSTGFVNLLKTKYTSIADSKKFISSFDRIMYVPEEDLFEFALDYKNFSRTDADYIKKWKLYSYGNRIRIFRNP
KKNNVFDWEEVCLTSAYKELFNKYGINYQQGDIRALLCEQSDKAFYSSFMALMSLMLQMRNSITGRTDVDFLISPVK
NSDGIFYDSRNYEAQENAILPKNADANGAYNIARKVLWAIGQFKKAEDEKLDKVKIAISNKEWLEYAQTSVKH
XPXPXPXPXPXPXPMVSKGEEDNMAIIKEFMRFKVHMEGSVNGHEFEIEGEGEGRPYEGTQTAKLKVTKGGPLPFAW
DILSPQFMYGSKAYVKHPADIPDYLKLSFPEGFKWERVMNFEDGGVVTVTQDSSLQDGEFIYKVKLRGTNFNFPSDG
PVMQKKTMGWEASSERMYPEDGALKGEIKQRLKLKDGGHYDEAVKTTYKAKKPVQLPGAYNVNIKLDITSHNEDYTI
VEQYEREAGRHSTGGMDELYK
SEQ ID NO: 302
MSKLEKFTNCYSLSKTLRFKAIPVGKTQENIDNKRLLVEDEKRAEDYKGVKKLLDRYYLSFINDVLHSIKLKNLNNY
ISLFRKKTRTEKENKELENLEINLRKEIAKAFKGNEGYKSLFKKDIIETILPEFLDDKDEIALVNSFNGFTTAFTGF
FDNRENMFSEEAKSTSIAFRCINENLTRYISNMDIFEKVDAIFDKHEVQEIKEKILNSDYDVEDFFEGEFFNEVLTQ
EGIDVYNAIIGGFVTESGEKIKGLNEYINLYNQKTKQKLPKFKPLYKQVLSDRESLSFYGEGYTSDEEVLEVFRNTL
NKNSEIFSSIKKLEKLFKNFDEYSSAGIFVKNGPAISTISKDIFGEWNVIRDKWNAEYDDIHLKKKAVVTEKYEDDR
RKSFKKIGSFSLEQLQEYADADLSVVEKLKEIIIQKVDEIYKVYGSSEKLFDADFVLEKSLKKNDAVVAIMKDLLDS
VKSFENYIKAFFGEGKETNRDESFYGDFVLAYDILLKVDHIYDAIRNYVTQKPYSKDKFKLYFQNPQFMGGWDKDKE
TDYRATILRYGSKYYLAIMDKKYAKCLQKIDKDDVNGNYEKINYKLLPGPNKMLPKVFFSKKWMAYYNPSEDIQKIY
KNGTFKKGDMFNLNDCHKLIDFFKDSISRYPKWSNAYDFNFSETEKYKDIAGFYREVEEQGYKVSFESASKKEVDKL
VEEGKLYMFQIYNKDFSDKSHGTPNLHTMYFKLLFDENNHGQIRLSGGAELFMRRASLKKEELVVHPANSPIANKNP
DNPKKTTTLSYDVYKDKRFSEDQYLLHIPIAINKCPKNIFKINTEVRVLLKHDDNPYVIGIDRGERNLLYIVVVDGK
GNIVEQYSLNEIINNFNGIRIKTDYHSLLDKKEKERFEARQNWTSIENIKELKAGYISQVVHKICELVEKYDAVIAL
EDLNSGFKNSRVKVEKQVYQKFEKMLIDKLNYMVDKKSNPCATGGALKGYQITNKFESFKSMSTQNGFIFYIPAWLT
SKIDPSTGFVNLLKTKYTSIADSKKFISSFDRIMYVPEEDLFEFALDYKNFSRTDADYIKKWKLYSYGNRIRIFRNP
KKNNVFDWEEVCLTSAYKELFNKYGINYQQGDIRALLCEQSDKAFYSSFMALMSLMLQMRNSITGRTDVDFLISPVK
NSDGIFYDSRNYEAQENAILPKNADANGAYNIARKVLWAIGQFKKAEDEKLDKVKIAISNKEWLEYAQTSVKH
XPXPXPXPXPXPXPXPMVSKGEEDNMAIIKEFMRFKVHMEGSVNGHEFEIEGEGEGRPYEGTQTAKLKVTKGGPLPF
AWDILSPQFMYGSKAYVKHPADIPDYLKLSFPEGFKWERVMNFEDGGVVTVTQDSSLQDGEFIYKVKLRGTNFNFPS
DGPVMQKKTMGWEASSERMYPEDGALKGEIKQRLKLKDGGHYDEAVKTTYKAKKPVQLPGAYNVNIKLDITSHNEDY
TIVEQYEREAGRHSTGGMDELYK
SEQ ID NO: 303
MSKLEKFTNCYSLSKTLRFKAIPVGKTQENIDNKRLLVEDEKRAEDYKGVKKLLDRYYLSFINDVLHSIKLKNLNNY
ISLFRKKTRTEKENKELENLEINLRKEIAKAFKGNEGYKSLFKKDIIETILPEFLDDKDEIALVNSFNGFTTAFTGF
FDNRENMFSEEAKSTSIAFRCINENLTRYISNMDIFEKVDAIFDKHEVQEIKEKILNSDYDVEDFFEGEFFNEVLTQ
EGIDVYNAIIGGFVTESGEKIKGLNEYINLYNQKTKQKLPKFKPLYKQVLSDRESLSFYGEGYTSDEEVLEVFRNTL
NKNSEIFSSIKKLEKLFKNFDEYSSAGIFVKNGPAISTISKDIFGEWNVIRDKWNAEYDDIHLKKKAVVTEKYEDDR
RKSFKKIGSFSLEQLQEYADADLSVVEKLKEIIIQKVDEIYKVYGSSEKLFDADFVLEKSLKKNDAVVAIMKDLLDS
VKSFENYIKAFFGEGKETNRDESFYGDFVLAYDILLKVDHIYDAIRNYVTQKPYSKDKFKLYFQNPQFMGGWDKDKE
TDYRATILRYGSKYYLAIMDKKYAKCLQKIDKDDVNGNYEKINYKLLPGPNKMLPKVFFSKKWMAYYNPSEDIQKIY
KNGTFKKGDMFNLNDCHKLIDFFKDSISRYPKWSNAYDFNFSETEKYKDIAGFYREVEEQGYKVSFESASKKEVDKL
VEEGKLYMFQIYNKDFSDKSHGTPNLHTMYFKLLFDENNHGQIRLSGGAELFMRRASLKKEELVVHPANSPIANKNP
DNPKKTTTLSYDVYKDKRFSEDQYLLHIPIAINKCPKNIFKINTEVRVLLKHDDNPYVIGIDRGERNLLYIVVVDGK
GNIVEQYSLNEIINNFNGIRIKTDYHSLLDKKEKERFEARQNWTSIENIKELKAGYISQVVHKICELVEKYDAVIAL
EDLNSGFKNSRVKVEKQVYQKFEKMLIDKLNYMVDKKSNPCATGGALKGYQITNKFESFKSMSTQNGFIFYIPAWLT
SKIDPSTGFVNLLKTKYTSIADSKKFISSFDRIMYVPEEDLFEFALDYKNFSRTDADYIKKWKLYSYGNRIRIFRNP
KKNNVEDWEEVCLTSAYKELFNKYGINYQQGDIRALLCEQSDKAFYSSFMALMSLMLQMRNSITGRTDVDFLISPVK
NSDGIFYDSRNYEAQENAILPKNADANGAYNIARKVLWAIGQFKKAEDEKLDKVKIAISNKEWLEYAQTSVKH
XPXPXPXPXPXPXPXPXPMVSKGEEDNMAIIKEFMRFKVHMEGSVNGHEFEIEGEGEGRPYEGTQTAKLKVTKGGPL
PFAWDILSPQFMYGSKAYVKHPADIPDYLKLSFPEGFKWERVMNFEDGGVVTVTQDSSLQDGEFIYKVKLRGTNFNF
PSDGPVMQKKTMGWEASSERMYPEDGALKGEIKQRLKLKDGGHYDEAVKTTYKAKKPVQLPGAYNVNIKLDITSHNE
DYTIVEQYEREAGRHSTGGMDELYK
SEQ ID NO: 304
MSKLEKFTNCYSLSKTLRFKAIPVGKTQENIDNKRLLVEDEKRAEDYKGVKKLLDRYYLSFINDVLHSIKLKNLNNY
ISLFRKKTRTEKENKELENLEINLRKEIAKAFKGNEGYKSLFKKDIIETILPEFLDDKDEIALVNSENGETTAFTGF
FDNRENMFSEEAKSTSIAFRCINENLTRYISNMDIFEKVDAIFDKHEVQEIKEKILNSDYDVEDFFEGEFFNFVLIQ
EGIDVYNAIIGGFVTESGEKIKGLNEYINLYNQKTKQKLPKFKPLYKQVLSDRESLSFYGEGYTSDEEVLEVFRNTL
NKNSEIFSSIKKLEKLFKNFDEYSSAGIFVKNGPAISTISKDIFGEWNVIRDKWNAEYDDIHLKKKAVVTEKYEDDR
RKSFKKIGSFSLEQLQEYADADLSVVEKLKEIIIQKVDEIYKVYGSSEKLFDADFVLEKSLKKNDAVVAIMKDLLDS
VKSFENYIKAFFGEGKETNRDESFYGDFVLAYDILLKVDHIYDAIRNYVTQKPYSKDKFKLYFQNPQFMGGWDKDKE
TDYRATILRYGSKYYLAIMDKKYAKCLQKIDKDDVNGNYEKINYKLLPGPNKMLPKVFFSKKWMAYYNPSEDIQKIY
KNGTFKKGDMFNLNDCHKLIDFFKDSISRYPKWSNAYDENFSETEKYKDIAGFYREVEEQGYKVSFESASKKEVDKL
VEEGKLYMFQIYNKDFSDKSHGTPNLHTMYFKLLFDENNHGQIRLSGGAELFMRRASLKKEELVVHPANSPIANKNP
DNPKKITTLSYDVYKDKRESEDQYLLHIPIAINKCPKNIFKINTEVRVLLKHDDNPYVIGIDRGERNLLYIVVVDGK
GNIVEQYSLNEIINNFNGIRIKTDYHSLLDKKEKERFEARQNWTSIENIKELKAGYISQVVHKICELVEKYDAVIAL
EDLNSGFKNSRVKVEKQVYQKFEKMLIDKLNYMVDKKSNPCATGGALKGYQITNKFESFKSMSTQNGFIFYIPAWLT
SKIDPSTGFVNLLKTKYTSIADSKKFISSFDRIMYVPEEDLFEFALDYKNFSRTDADYIKKWKLYSYGNRIRIFRNP
KKNNVFDWEEVCLTSAYKELFNKYGINYQQGDIRALLCEQSDKAFYSSFMALMSLMLQMRNSITGRTDVDFLISPVK
NSDGIFYDSRNYEAQENAILPKNADANGAYNIARKVLWAIGQFKKAEDEKLDKVKIAISNKEWLEYAQTSVKH
XPXPXPXPXPXPXPXPXPXPMVSKGEEDNMAIIKEFMRFKVHMEGSVNGHEFEIEGEGEGRPYEGTQTAKLKVTKGG
PLPFAWDILSPQFMYGSKAYVKHPADIPDYLKLSFPEGFKWERVMNFEDGGVVTVTQDSSLQDGEFIYKVKLRGTNF
NFPSDGPVMQKKTMGWEASSERMYPEDGALKGEIKQRLKLKDGGHYDEAVKTTYKAKKPVQLPGAYNVNIKLDITSH
NEDYTIVEQYEREAGRHSTGGMDELYK
SEQ ID NO: 305
MSKLEKFTNCYSLSKTLRFKAIPVGKTQENIDNKRLLVEDEKRAEDYKGVKKLLDRYYLSFINDVLHSIKLKNLNNY
ISLFRKKTRTEKENKELENLEINLRKEIAKAFKGNEGYKSLFKKDIIETILPEFLDDKDEIALVNSFNGFTTAFTGF
FDNRENMESEEAKSTSIAFRCINENLTRYISNMDIFEKVDAIFDKHEVQEIKEKILNSDYDVEDFFEGEFFNFVLTQ
EGIDVYNAIIGGFVTESGEKIKGLNEYINLYNQKTKQKLPKFKPLYKQVLSDRESLSFYGEGYTSDEEVLEVFRNTL
NKNSEIFSSIKKLEKLFKNFDEYSSAGIFVKNGPAISTISKDIFGEWNVIRDKWNAEYDDIHLKKKAVVTEKYEDDR
RKSFKKIGSFSLEQLQEYADADLSVVEKLKEIIIQKVDEIYKVYGSSEKLFDADFVLEKSLKKNDAVVAIMKDLLDS
VKSFENYIKAFFGEGKETNRDESFYGDFVLAYDILLKVDHIYDAIRNYVTQKPYSKDKFKLYFQNPQFMGGWDKDKE
TDYRATILRYGSKYYLAIMDKKYAKCLQKIDKDDVNGNYEKINYKLLPGPNKMLPKVFFSKKWMAYYNPSEDIQKIY
KNGTFKKGDMFNLNDCHKLIDFFKDSISRYPKWSNAYDFNFSETEKYKDIAGFYREVEEQGYKVSFESASKKEVDKL
VEEGKLYMFQIYNKDFSDKSHGTPNLHTMYFKLLFDENNHGQIRLSGGAELFMRRASLKKEELVVHPANSPIANKNP
DNPKKTTTLSYDVYKDKRFSEDQYLLHIPIAINKCPKNIFKINTEVRVLLKHDDNPYVIGIDRGERNLLYIVVVDGK
GNIVEQYSLNEIINNFNGIRIKTDYHSLLDKKEKERFEARQNWTSIENIKELKAGYISQVVHKICELVEKYDAVIAL
EDLNSGFKNSRVKVEKQVYQKFEKMLIDKLNYMVDKKSNPCATGGALKGYQITNKFESFKSMSTQNGFIFYIPAWLT
SKIDPSTGFVNLLKTKYTSIADSKKFISSFDRIMYVPEEDLFEFALDYKNFSRTDADYIKKWKLYSYGNRIRIFRNP
KKNNVFDWEEVCLTSAYKELFNKYGINYQQGDIRALLCEQSDKAFYSSFMALMSLMLQMRNSITGRTDVDFLISPVK
NSDGIFYDSRNYEAQENAILPKNADANGAYNIARKVLWAIGQFKKAEDEKLDKVKIAISNKEWLEYAQTSVKH
XPXPXPXPXPXPXPXPXPXPXPMVSKGEEDNMAIIKEFMRFKVHMEGSVNGHEFEIEGEGEGRPYEGTQTAKLKVTK
GGPLPFAWDILSPQFMYGSKAYVKHPADIPDYLKLSFPEGFKWERVMNFEDGGVVTVTQDSSLQDGEFIYKVKLRGT
NFNFPSDGPVMQKKTMGWEASSERMYPEDGALKGEIKQRLKLKDGGHYDEAVKTTYKAKKPVQLPGAYNVNIKLDIT
SHNEDYTIVEQYEREAGRHSTGGMDELYK
SEQ ID NO: 306
MSKLEKFTNCYSLSKTLRFKAIPVGKTQENIDNKRLLVEDEKRAEDYKGVKKLLDRYYLSFINDVLHSIKLKNLNNY
ISLFRKKTRTEKENKELENLEINLRKEIAKAFKGNEGYKSLFKKDIIETILPEFLDDKDEIALVNSENGETTAFTGE
FDNRENMESEEAKSTSIAFRCINENLTRYISNMDIFEKVDAIFDKHEVQEIKEKILNSDYDVEDFFEGEFFNFVLTQ
EGIDVYNAIIGGFVTESGEKIKGLNEYINLYNQKTKQKLPKFKPLYKQVLSDRESLSFYGEGYTSDEEVLEVFRNTL
NKNSEIFSSIKKLEKLFKNFDEYSSAGIFVKNGPAISTISKDIFGEWNVIRDKWNAEYDDIHLKKKAVVTEKYEDDR
RKSFKKIGSFSLEQLQEYADADLSVVEKLKEIIIQKVDEIYKVYGSSEKLFDADFVLEKSLKKNDAVVAIMKDLLDS
VKSFENYIKAFFGEGKETNRDESFYGDFVLAYDILLKVDHIYDAIRNYVTQKPYSKDKFKLYFQNPQFMGGWDKDKE
TDYRATILRYGSKYYLAIMDKKYAKCLQKIDKDDVNGNYEKINYKLLPGPNKMLPKVFFSKKWMAYYNPSEDIQKIY
KNGTFKKGDMFNLNDCHKLIDFFKDSISRYPKWSNAYDENFSETEKYKDIAGFYREVEEQGYKVSFESASKKEVDKL
VEEGKLYMFQIYNKDFSDKSHGTPNLHTMYFKLLFDENNHGQIRLSGGAELFMRRASLKKEELVVHPANSPIANKNP
DNPKKITTLSYDVYKDKRFSEDQYLLHIPIAINKCPKNIFKINTEVRVLLKHDDNPYVIGIDRGERNLLYIVVVDGK
GNIVEQYSLNEIINNFNGIRIKTDYHSLLDKKEKERFEARQNWTSIENIKELKAGYISQVVHKICELVEKYDAVIAL
EDLNSGFKNSRVKVEKQVYQKFEKMLIDKLNYMVDKKSNPCATGGALKGYQITNKFESFKSMSTQNGFIFYIPAWLT
SKIDPSTGFVNLLKTKYTSIADSKKFISSFDRIMYVPEEDLFEFALDYKNFSRTDADYIKKWKLYSYGNRIRIFRNP
KKNNVEDWEEVCLTSAYKELENKYGINYQQGDIRALLCEQSDKAFYSSFMALMSLMLQMRNSITGRTDVDFLISPVK
NSDGIFYDSRNYEAQENAILPKNADANGAYNIARKVLWAIGQFKKAEDEKLDKVKIAISNKEWLEYAQTSVKH
XPXPXPXPXPXPXPXPXPXPXPXPMVSKGEEDNMAIIKEFMRFKVHMEGSVNGHEFEIEGEGEGRPYEGTQTAKLKV
TKGGPLPFAWDILSPQFMYGSKAYVKHPADIPDYLKLSFPEGFKWERVMNFEDGGVVTVTQDSSLQDGEFIYKVKLR
GTNFNFPSDGPVMQKKTMGWEASSERMYPEDGALKGEIKQRLKLKDGGHYDEAVKTTYKAKKPVQLPGAYNVNIKLD
ITSHNEDYTIVEQYEREAGRHSTGGMDELYK
SEQ ID NO: 307
MSKLEKFTNCYSLSKTLRFKAIPVGKTQENIDNKRLLVEDEKRAEDYKGVKKLLDRYYLSFINDVLHSIKLKNLNNY
ISLERKKTRTEKENKELENLEINLRKEIAKAFKGNEGYKSLFKKDIIETILPEFLDDKDEIALVNSENGETTAFTGF
FDNRENMFSEEAKSTSIAFRCINENLTRYISNMDIFEKVDAIFDKHEVQEIKEKILNSDYDVEDFFEGEFFNFVLTQ
EGIDVYNAIIGGFVTESGEKIKGLNEYINLYNQKTKQKLPKFKPLYKQVLSDRESLSFYGEGYISDEEVLEVERNTL
NKNSEIFSSIKKLEKLFKNFDEYSSAGIFVKNGPAISTISKDIFGEWNVIRDKWNAEYDDIHLKKKAVVTEKYEDDR
RKSFKKIGSFSLEQLQEYADADLSVVEKLKEIIIQKVDEIYKVYGSSEKLFDADFVLEKSLKKNDAVVAIMKDLLDS
VKSFENYIKAFFGEGKETNRDESFYGDFVLAYDILLKVDHIYDAIRNYVTQKPYSKDKFKLYFQNPQFMGGWDKDKE
TDYRATILRYGSKYYLAIMDKKYAKCLQKIDKDDVNGNYEKINYKLLPGPNKMLPKVFFSKKWMAYYNPSEDIQKIY
KNGTFKKGDMFNLNDCHKLIDFFKDSISRYPKWSNAYDFNFSETEKYKDIAGFYREVEEQGYKVSFESASKKEVDKL
VEEGKLYMFQIYNKDFSDKSHGTPNLHTMYFKLLFDENNHGQIRLSGGAELFMRRASLKKEELVVHPANSPIANKNP
DNPKKTTTLSYDVYKDKRFSEDQYLLHIPIAINKCPKNIFKINTEVRVLLKHDDNPYVIGIDRGERNLLYIVVVDGK
GNIVEQYSLNEIINNFNGIRIKTDYHSLLDKKEKERFEARQNWTSIENIKELKAGYISQVVHKICELVEKYDAVIAL
EDLNSGFKNSRVKVEKQVYQKFEKMLIDKLNYMVDKKSNPCATGGALKGYQITNKFESFKSMSTQNGFIFYIPAWLT
SKIDPSTGFVNLLKTKYTSIADSKKFISSFDRIMYVPEEDLFEFALDYKNFSRTDADYIKKWKLYSYGNRIRIFRNP
KKNNVFDWEEVCLTSAYKELFNKYGINYQQGDIRALLCEQSDKAFYSSFMALMSLMLQMRNSITGRTDVDFLISPVK
NSDGIFYDSRNYEAQENAILPKNADANGAYNIARKVLWAIGQFKKAEDEKLDKVKIAISNKEWLEYAQTSVKH
XPXPXPXPXPXPXPXPXPXPXPXPXMVSKGEEDNMAIIKEFMRFKVHMEGSVNGHEFEIEGEGEGRPYEGTQTAKLK
VTKGGPLPFAWDILSPQFMYGSKAYVKHPADIPDYLKLSFPEGFKWERVMNFEDGGVVTVTQDSSLQDGEFIYKVKL
RGTNFNFPSDGPVMQKKTMGWEASSERMYPEDGALKGEIKQRLKLKDGGHYDEAVKTTYKAKKPVQLPGAYNVNIKL
DITSHNEDYTIVEQYEREAGRHSTGGMDELYK
SEQ ID NO: 308
MSKLEKFTNCYSLSKTLRFKAIPVGKTQENIDNKRLLVEDEKRAEDYKGVKKLLDRYYLSFINDVLHSIKLKNLNNY
ISLFRKKTRTEKENKELENLEINLRKEIAKAFKGNEGYKSLFKKDIIETILPEFLDDKDEIALVNSFNGFTTAFTGF
FDNRENMFSEEAKSTSIAFRCINENLTRYISNMDIFEKVDAIFDKHEVQEIKEKILNSDYDVEDFFEGEFFNFVLTQ
EGIDVYNAIIGGFVTESGEKIKGLNEYINLYNQKTKQKLPKFKPLYKQVLSDRESLSFYGEGYTSDEEVLEVERNTL
NKNSEIFSSIKKLEKLFKNFDEYSSAGIFVKNGPAISTISKDIFGEWNVIRDKWNAEYDDIHLKKKAVVTEKYEDDR
RKSFKKIGSFSLEQLQEYADADLSVVEKLKEIIIQKVDEIYKVYGSSEKLFDADFVLEKSLKKNDAVVAIMKDLLDS
VKSFENYIKAFFGEGKETNRDESFYGDFVLAYDILLKVDHIYDAIRNYVTQKPYSKDKFKLYFQNPQFMGGWDKDKE
TDYRATILRYGSKYYLAIMDKKYAKCLQKIDKDDVNGNYEKINYKLLPGPNKMLPKVFFSKKWMAYYNPSEDIQKIY
KNGTFKKGDMFNLNDCHKLIDFFKDSISRYPKWSNAYDFNFSETEKYKDIAGFYREVEEQGYKVSFESASKKEVDKL
VEEGKLYMFQIYNKDFSDKSHGTPNLHTMYFKLLFDENNHGQIRLSGGAELFMRRASLKKEELVVHPANSPIANKNP
DNPKKTTTLSYDVYKDKRFSEDQYLLHIPIAINKCPKNIFKINTEVRVLLKHDDNPYVIGIDRGERNLLYIVVVDGK
GNIVEQYSLNEIINNFNGIRIKTDYHSLLDKKEKERFEARQNWTSIENIKELKAGYISQVVHKICELVEKYDAVIAL
EDLNSGFKNSRVKVEKQVYQKFEKMLIDKLNYMVDKKSNPCATGGALKGYQITNKFESFKSMSTQNGFIFYIPAWLT
SKIDPSTGFVNLLKTKYTSIADSKKFISSFDRIMYVPEEDLFEFALDYKNFSRTDADYIKKWKLYSYGNRIRIFRNP
KKNNVFDWEEVCLTSAYKELFNKYGINYQQGDIRALLCEQSDKAFYSSFMALMSLMLQMRNSITGRTDVDFLISPVK
NSDGIFYDSRNYEAQENAILPKNADANGAYNIARKVLWAIGQFKKAEDEKLDKVKIAISNKEWLEYAQTSVKH
XPXPXPXPXPXPXPXPXPXPXPXPXPXPMVSKGEEDNMAIIKEFMRFKVHMEGSVNGHEFEIEGEGEGRPYEGTQTA
KLKVTKGGPLPFAWDILSPQFMYGSKAYVKHPADIPDYLKLSFPEGFKWERVMNFEDGGVVTVTQDSSLQDGEFIYK
VKLRGTNFNFPSDGPVMQKKTMGWEASSERMYPEDGALKGEIKQRLKLKDGGHYDEAVKTTYKAKKPVQLPGAYNVN
IKLDITSHNEDYTIVEQYEREAGRHSTGGMDELYK
SEQ ID NO: 309
MSKLEKFTNCYSLSKTLRFKAIPVGKTQENIDNKRLLVEDEKRAEDYKGVKKLLDRYYLSFINDVLHSIKLKNLNNY
ISLFRKKTRTEKENKELENLEINLRKEIAKAFKGNEGYKSLFKKDIIETILPEFLDDKDEIALVNSFNGFTTAFTGF
FDNRENMFSEEAKSTSIAFRCINENLTRYISNMDIFEKVDAIFDKHEVQEIKEKILNSDYDVEDFFEGEFFNFVLTQ
EGIDVYNAIIGGFVTESGEKIKGLNEYINLYNQKTKQKLPKFKPLYKQVLSDRESLSFYGEGYTSDEEVLEVERNTL
NKNSEIFSSIKKLEKLFKNFDEYSSAGIFVKNGPAISTISKDIFGEWNVIRDKWNAEYDDIHLKKKAVVTEKYEDDR
RKSFKKIGSFSLEQLQEYADADLSVVEKLKEIIIQKVDEIYKVYGSSEKLFDADFVLEKSLKKNDAVVAIMKDLLDS
VKSFENYIKAFFGEGKETNRDESFYGDFVLAYDILLKVDHIYDAIRNYVTQKPYSKDKFKLYFQNPQFMGGWDKDKE
TDYRATILRYGSKYYLAIMDKKYAKCLQKIDKDDVNGNYEKINYKLLPGPNKMLPKVFFSKKWMAYYNPSEDIQKIY
KNGTFKKGDMFNLNDCHKLIDFFKDSISRYPKWSNAYDFNFSETEKYKDIAGFYREVEEQGYKVSFESASKKEVDKL
VEEGKLYMFQIYNKDFSDKSHGTPNLHTMYFKLLFDENNHGQIRLSGGAELFMRRASLKKEELVVHPANSPIANKNP
DNPKKTTTLSYDVYKDKRESEDQYLLHIPIAINKCPKNIFKINTEVRVLLKHDDNPYVIGIDRGERNLLYIVVVDGK
GNIVEQYSLNEIINNFNGIRIKTDYHSLLDKKEKERFEARQNWTSIENIKELKAGYISQVVHKICELVEKYDAVIAL
EDLNSGFKNSRVKVEKQVYQKFEKMLIDKLNYMVDKKSNPCATGGALKGYQITNKFESFKSMSTQNGFIFYIPAWLT
SKIDPSTGFVNLLKTKYTSIADSKKFISSFDRIMYVPEEDLFEFALDYKNFSRTDADYIKKWKLYSYGNRIRIFRNP
KKNNVFDWEEVCLTSAYKELENKYGINYQQGDIRALLCEQSDKAFYSSFMALMSLMLQMRNSITGRTDVDFLISPVK
NSDGIFYDSRNYEAQENAILPKNADANGAYNIARKVLWAIGQFKKAEDEKLDKVKIAISNKEWLEYAQTSVKH
GGGGSEAAAKGGGGSMVSKGEEDNMAIIKEFMRFKVHMEGSVNGHEFEIEGEGEGRPYEGTQTAKLKVTKGGPLPFA
WDILSPQFMYGSKAYVKHPADIPDYLKLSFPEGFKWERVMNFEDGGVVTVTQDSSLQDGEFIYKVKLRGTNFNFPSD
GPVMQKKTMGWEASSERMYPEDGALKGEIKQRLKLKDGGHYDEAVKTTYKAKKPVQLPGAYNVNIKLDITSHNEDYT
IVEQYEREAGRHSTGGMDELYK

[0103] Table V.9 provides the LbCas12a protein variant (E795L) amino acid sequence.

TABLE V.9
LbCas12a protein variant (E795L) amino
acid sequence

SEQ ID NO: 310 (LbCas12a (E795L) Protein)
MSKLEKFTNCYSLSKTLRFKAIPVGKTQENIDNKRLLVEDEKRAEDYKGV
KKLLDRYYLSFINDVLHSIKLKNLNNYISLFRKKTRTEKENKELENLEIN
LRKEIAKAFKGNEGYKSLFKKDIIETILPEFLDDKDEIALVNSENGETTA
FTGFFDNRENMESEEAKSTSIAFRCINENLTRYISNMDIFEKVDAIFDKH
EVQEIKEKILNSDYDVEDFFEGEFFNEVLTQEGIDVYNAIIGGFVTESGE
KIKGLNEYINLYNQKTKQKLPKFKPLYKQVLSDRESLSFYGEGYTSDEEV
LEVFRNTLNKNSEIFSSIKKLEKLFKNFDEYSSAGIFVKNGPAISTISKD
IFGEWNVIRDKWNAEYDDIHLKKKAVVTEKYEDDRRKSFKKIGSFSLEQL
QEYADADLSVVEKLKEIIIQKVDEIYKVYGSSEKLFDADFVLEKSLKKND
AVVAIMKDLLDSVKSFENYIKAFFGEGKETNRDESFYGDFVLAYDILLKV
DHIYDAIRNYVTQKPYSKDKFKLYFQNPQFMGGWDKDKETDYRATILRYG
SKYYLAIMDKKYAKCLQKIDKDDVNGNYEKINYKLLPGPNKMLPKVFFSK
KWMAYYNPSEDIQKIYKNGTFKKGDMFNLNDCHKLIDFFKDSISRYPKWS
NAYDFNFSETEKYKDIAGFYREVEEQGYKVSFESASKKEVDKLVEEGKLY
MFQIYNKDFSDKSHGTPNLHTMYFKLLFDENNHGQIRLSGGAELFMRRAS
LKKEELVVHPANSPIANKNPDNPKKTTTLSYDVYKDKRFSEDQYLLHIPI
AINKCPKNIFKINTEVRVLLKHDDNPYVIGIDRGERNLLYIVVVDGKGNI
VEQYSLNEIINNFNGIRIKTDYHSLLDKKEKERFEARQNWTSIENIKELK
AGYISQVVHKICELVEKYDAVIALEDLNSGFKNSRVKVEKQVYQKFEKML
IDKLNYMVDKKSNPCATGGALKGYQITNKFESFKSMSTQNGFIFYIPAWL
TSKIDPSTGFVNLLKTKYTSIADSKKFISSFDRIMYVPEEDLFEFALDYK
NFSRTDADYIKKWKLYSYGNRIRIFRNPKKNNVFDWEEVCLTSAYKELFN
KYGINYQQGDIRALLCEQSDKAFYSSFMALMSLMLQMRNSITGRTDVDFL
ISPVKNSDGIFYDSRNYEAQENAILPKNADANGAYNIARKVLWAIGQFKK
AEDEKLDKVKIAISNKEWLEYAQTSVKH

[0104] Table V.10 provides chimera fusion proteins between Cas protein amino acid sequences to either eGFP or mCherry amino acid sequences (bolded, italicized) without an intervening linker polypeptide.

TABLE V.10
Cas Protein-Fluorescent Protein Chimeras

SEQ ID NO: 311 (Cas9 Protein-eGFP)
MDKKYSIGLDIGTNSVGWAVITDEYKVPSKKFKVLGNTDRHSIKKNLIGALLFDSGETAEATRLKRTARRRYTRRK
NRICYLQEIFSNEMAKVDDSFFHRLEESFLVEEDKKHERHPIFGNIVDEVAYHEKYPTIYHLRKKLVDSTDKADLR
LIYLALAHMIKFRGHFLIEGDLNPDNSDVDKLFIQLVQTYNQLFEENPINASGVDAKAILSARLSKSRRLENLIAQ
LPGEKKNGLFGNLIALSLGLTPNFKSNFDLAEDAKLQLSKDTYDDDLDNLLAQIGDQYADLFLAAKNLSDAILLSD
ILRVNTEITKAPLSASMIKRYDEHHQDLTLLKALVRQQLPEKYKEIFFDQSKNGYAGYIDGGASQEEFYKFIKPIL
EKMDGTEELLVKLNREDLLRKQRTFDNGSIPHQIHLGELHAILRRQEDFYPFLKDNREKIEKILTFRIPYYVGPLA
RGNSRFAWMTRKSEETITPWNFEEVVDKGASAQSFIERMTNFDKNLPNEKVLPKHSLLYEYFTVYNELTKVKYVTE
GMRKPAFLSGEQKKAIVDLLFKINRKVIVKQLKEDYFKKIECFDSVEISGVEDRFNASLGTYHDLLKIIKDKDFLD
NEENEDILEDIVLTLTLFEDREMIEERLKTYAHLFDDKVMKQLKRRRYTGWGRLSRKLINGIRDKQSGKTILDFLK
SDGFANRNFMQLIHDDSLTFKEDIQKAQVSGQGDSLHEHIANLAGSPAIKKGILQTVKVVDELVKVMGRHKPENIV
IEMARENQTTQKGQKNSRERMKRIEEGIKELGSQILKEHPVENTQLQNEKLYLYYLQNGRDMYVDQELDINRLSDY
DVDHIVPQSFLKDDSIDNKVLTRSDKNRGKSDNVPSEEVVKKMKNYWRQLLNAKLITQRKFDNLIKAERGGLSELD
KAGFIKRQLVETRQITKHVAQILDSRMNTKYDENDKLIREVKVITLKSKLVSDERKDFQFYKVREINNYHHAHDAY
LNAVVGTALIKKYPKLESEFVYGDYKVYDVRKMIAKSEQEIGKATAKYFFYSNIMNFFKTEITLANGEIRKRPLIE
TNGETGEIVWDKGRDFATVRKVLSMPQVNIVKKTEVQTGGFSKESILPKRNSDKLIARKKDWDPKKYGGFDSPTVA
YSVLVVAKVEKGKSKKLKSVKELLGITIMERSSFEKNPIDFLEAKGYKEVKKDLIIKLPKYSLFELENGRKRMLAS
AGELQKGNELALPSKYVNFLYLASHYEKLKGSPEDNEQKQLFVEQHKHYLDEIIEQISEFSKRVILADANLDKVLS
AYNKHRDKPIREQAENIIHLFTLINLGAPAAFKYFDTTIDRKRYTSTKEVLDATLIHQSITGLYETRIDLSQLGGD
MVSKGEELFTGVVPILVELDGDVNGHKFSVSGEGEGDATYGKLTLKFICTTGKLPVPWPTLVTTLTYGVQCFSRYP
DHMKQHDFFKSAMPEGYVQERTIFFKDDGNYKTRAEVKFEGDTLVNRIELKGIDFKEDGNILGHKLEYNYNSHNVY
IMADKQKNGIKVNFKIRHNIEDGSVQLADHYQQNTPIGDGPVLLPDNHYLSTQSALSKDPNEKRDHMVLLEFVTAA
GITLGMDELYK
SEQ ID NO: 312 (AsCas12a Protein-eGFP)
MTQFEGFTNLYQVSKTLRFELIPQGKTLKHIQEQGFIEEDKARNDHYKELKPIIDRIYKTYADQCLQLVQLDWENLS
AAIDSYRKEKTEETRNALIEEQATYRNAIHDYFIGRIDNLTDAINKRHAEIYKGLFKAELFNGKVLKQLGTVTTTEH
ENALLRSFDKETTYFSGFYENRKNVFSAEDISTAIPHRIVQDNFPKFKENCHIFTRLITAVPSLREHFENVKKAIGI
FVSTSIEEVFSFPFYNQLLTQTQIDLYNQLLGGISREAGTEKIKGLNEVLNLAIQKNDETAHIIASLPHRFIPLFKQ
ILSDRNTLSFILEEFKSDEEVIQSFCKYKTLLRNENVLETAEALFNELNSIDLTHIFISHKKLETISSALCDHWDTL
RNALYERRISELTGKITKSAKEKVQRSLKHEDINLQEIISAAGKELSEAFKQKTSEILSHAHAALDQPLPTTLKKQE
EKEILKSQLDSLLGLYHLLDWFAVDESNEVDPEFSARLTGIKLEMEPSLSFYNKARNYATKKPYSVEKFKLNFQMPT
LASGWDVNKEKNNGAILFVKNGLYYLGIMPKQKGRYKALSFEPTEKTSEGFDKMYYDYFPDAAKMIPKCSTQLKAVT
AHFQTHTTPILLSNNFIEPLEITKEIYDLNNPEKEPKKFQTAYAKKTGDQKGYREALCKWIDFTRDFLSKYTKTTSI
DLSSLRPSSQYKDLGEYYAELNPLLYHISFQRIAEKEIMDAVETGKLYLFQIYNKDFAKGHHGKPNLHTLYWTGLFS
PENLAKTSIKLNGQAELFYRPKSRMKRMAHRLGEKMLNKKLKDQKTPIPDTLYQELYDYVNHRLSHDLSDEARALLP
NVITKEVSHEIIKDRRFTSDKEFFHVPITLNYQAANSPSKFNQRVNAYLKEHPETPIIGIDRGERNLIYITVIDSTG
KILEQRSLNTIQQFDYQKKLDNREKERVAARQAWSVVGTIKDLKQGYLSQVIHEIVDLMIHYQAVVVLENLNFGFKS
KRTGIAEKAVYQQFEKMLIDKLNCLVLKDYPAEKVGGVLNPYQLTDQFTSFAKMGTQSGFLFYVPAPYTSKIDPLTG
FVDPFVWKTIKNHESRKHFLEGFDFLHYDVKTGDFILHFKMNRNLSFQRGLPGEMPAWDIVFEKNETQFDAKGTPFI
AGKRIVPVIENHRFTGRYRDLYPANELIALLEEKGIVFRDGSNILPKLLENDDSHAIDTMVALIRSVLQMRNSNAAT
GEDYINSPVRDLNGVCFDSRFQNPEWPMDADANGAYHIALKGQLLLNHLKESKDLKLQNGISNQDWLAYIQELRNMV
SKGEEDNMAIIKEFMRFKVHMEGSVNGHEFEIEGEGEGRPYEGTQTAKLKVTKGGPLPFAWDILSPQFMYGSKAYVK
HPADIPDYLKLSFPEGFKWERVMNFEDGGVVTVTQDSSLQDGEFIYKVKLRGTNFPSDGPVMQKKTMGWEASSERMY
PEDGALKGEIKQRLKLKDGGHYDAEVKTTYKAKKPVQLPGAYNVNIKLDITSHNEDYTIVEQYERAEGRHSTGGMDE
LYK
SEQ ID NO: 313 (LbCas12a Protein-eGFP)
MSKLEKFTNCYSLSKTLRFKAIPVGKTQENIDNKRLLVEDEKRAEDYKGVKKLLDRYYLSFINDVLHSIKLKNLNNY
ISLFRKKTRTEKENKELENLEINLRKEIAKAFKGNEGYKSLFKKDIIETILPEFLDDKDEIALVNSENGETTAFTGF
FDNRENMESEEAKSTSIAFRCINENLTRYISNMDIFEKVDAIFDKHEVQEIKEKILNSDYDVEDFFEGEFFNEVLTQ
EGIDVYNAIIGGFVTESGEKIKGLNEYINLYNQKTKQKLPKFKPLYKQVLSDRESLSFYGEGYTSDEEVLEVFRNTL
NKNSEIFSSIKKLEKLFKNFDEYSSAGIFVKNGPAISTISKDIFGEWNVIRDKWNAEYDDIHLKKKAVVTEKYEDDR
RKSFKKIGSFSLEQLQEYADADLSVVEKLKEIIIQKVDEIYKVYGSSEKLFDADFVLEKSLKKNDAVVAIMKDLLDS
VKSFENYIKAFFGEGKETNRDESFYGDFVLAYDILLKVDHIYDAIRNYVTQKPYSKDKFKLYFQNPQFMGGWDKDKE
TDYRATILRYGSKYYLAIMDKKYAKCLQKIDKDDVNGNYEKINYKLLPGPNKMLPKVFFSKKWMAYYNPSEDIQKIY
KNGTFKKGDMFNLNDCHKLIDFFKDSISRYPKWSNAYDENFSETEKYKDIAGFYREVEEQGYKVSFESASKKEVDKL
VEEGKLYMFQIYNKDFSDKSHGTPNLHTMYFKLLFDENNHGQIRLSGGAELFMRRASLKKEELVVHPANSPIANKNP
DNPKKITTLSYDVYKDKRFSEDQYELHIPIAINKCPKNIFKINTEVRVLLKHDDNPYVIGIDRGERNLLYIVVVDGK
GNIVEQYSLNEIINNFNGIRIKTDYHSLLDKKEKERFEARQNWTSIENIKELKAGYISQVVHKICELVEKYDAVIAL
EDLNSGFKNSRVKVEKQVYQKFEKMLIDKLNYMVDKKSNPCATGGALKGYQITNKFESFKSMSTQNGFIFYIPAWLT
SKIDPSTGFVNLLKTKYTSIADSKKFISSFDRIMYVPEEDLFEFALDYKNFSRTDADYIKKWKLYSYGNRIRIFRNP
KKNNVFDWEEVCLTSAYKELFNKYGINYQQGDIRALLCEQSDKAFYSSFMALMSLMLQMRNSITGRTDVDFLISPVK
NSDGIFYDSRNYEAQENAILPKNADANGAYNIARKVLWAIGQFKKAEDEKLDKVKIAISNKEWLEYAQTSVKHMVSK
GEELFTGVVPILVELDGDVNGHKFSVSGEGEGDATYGKLTLKFICTTGKLPVPWPTLVTTLTYGVQCFSRYPDHMKQ
HDFFKSAMPEGYVQERTIFFKDDGNYKTRAEVKFEGDTLVNRIELKGIDFKEDGNILGHKLEYNYNSHNVYIMADKQ
KNGIKVNFKIRHNIEDGSVQLADHYQQNTPIGDGPVLLPDNHYLSTQSALSKDPNEKRDHMVLLEFVTAAGITLGMD
ELYK
SEQ ID NO: 314 (LbCas12a (E795L) Protein-eGFP)
MSKLEKFTNCYSLSKTLRFKAIPVGKTQENIDNKRLLVEDEKRAEDYKGVKKLLDRYYLSFINDVLHSIKLKNLNNY
ISLFRKKTRTEKENKELENLEINLRKEIAKAFKGNEGYKSLFKKDIIETILPEFLDDKDEIALVNSENGETTAFTGF
FDNRENMESEEAKSTSIAFRCINENLTRYISNMDIFEKVDAIFDKHEVQEIKEKILNSDYDVEDFFEGEFFNFVLTQ
EGIDVYNAIIGGFVTESGEKIKGLNEYINLYNQKTKQKLPKFKPLYKQVLSDRESLSFYGEGYTSDEEVLEVERNTL
NKNSEIFSSIKKLEKLFKNFDEYSSAGIFVKNGPAISTISKDIFGEWNVIRDKWNAEYDDIHLKKKAVVTEKYEDDR
RKSFKKIGSFSLEQLQEYADADLSVVEKLKEIIIQKVDEIYKVYGSSEKLFDADFVLEKSLKKNDAVVAIMKDLLDS
VKSFENYIKAFFGEGKETNRDESFYGDFVLAYDILLKVDHIYDAIRNYVTQKPYSKDKFKLYFQNPQFMGGWDKDKE
TDYRATILRYGSKYYLAIMDKKYAKCLQKIDKDDVNGNYEKINYKLLPGPNKMLPKVFFSKKWMAYYNPSEDIQKIY
KNGTFKKGDMFNLNDCHKLIDFFKDSISRYPKWSNAYDFNFSETEKYKDIAGFYREVEEQGYKVSFESASKKEVDKL
VEEGKLYMFQIYNKDFSDKSHGTPNLHTMYFKLLFDENNHGQIRLSGGAELFMRRASLKKEELVVHPANSPIANKNP
DNPKKTTTLSYDVYKDKRESEDQYLLHIPIAINKCPKNIFKINTEVRVLLKHDDNPYVIGIDRGERNLLYIVVVDGK
GNIVEQYSLNEIINNFNGIRIKTDYHSLLDKKEKERFEARQNWTSIENIKELKAGYISQVVHKICELVEKYDAVIAL
EDLNSGFKNSRVKVEKQVYQKFEKMLIDKLNYMVDKKSNPCATGGALKGYQITNKFESFKSMSTQNGFIFYIPAWLT
SKIDPSTGFVNLLKTKYTSIADSKKFISSFDRIMYVPEEDLFEFALDYKNFSRTDADYIKKWKLYSYGNRIRIFRNP
KKNNVEDWEEVCLTSAYKELENKYGINYQQGDIRALLCEQSDKAFYSSFMALMSLMLQMRNSITGRTDVDFLISPVK
NSDGIFYDSRNYEAQENAILPKNADANGAYNIARKVLWAIGQFKKAEDEKLDKVKIAISNKEWLEYAQTSVKHMVSK
GEELFTGVVPILVELDGDVNGHKFSVSGEGEGDATYGKLTLKFICTTGKLPVPWPTLVTTLTYGVQCFSRYPDHMKQ
HDFFKSAMPEGYVQERTIFFKDDGNYKTRAEVKFEGDTLVNRIELKGIDFKEDGNILGHKLEYNYNSHNVYIMADKQ
KNGIKVNFKIRHNIEDGSVQLADHYQQNTPIGDGPVLLPDNHYLSTQSALSKDPNEKRDHMVLLEFVTAAGITLGMD
ELYK
SEQ ID NO: 315 (Cas9 Protein-mCherry)
MDKKYSIGLDIGTNSVGWAVITDEYKVPSKKEKVLGNTDRHSIKKNLIGALLFDSGETAEATRLKRTARRRYTRRK
NRICYLQEIFSNEMAKVDDSFFHRLEESFLVEEDKKHERHPIFGNIVDEVAYHEKYPTIYHLRKKLVDSTDKADLR
LIYLALAHMIKFRGHFLIEGDLNPDNSDVDKLFIQLVQTYNQLFEENPINASGVDAKAILSARLSKSRRLENLIAQ
LPGEKKNGLFGNLIALSLGLIPNEKSNFDLAEDAKLQLSKDTYDDDLDNLLAQIGDQYADLFLAAKNLSDAILLSD
ILRVNTEITKAPLSASMIKRYDEHHQDLTLLKALVRQQLPEKYKEIFFDQSKNGYAGYIDGGASQEEFYKFIKPIL
EKMDGTEELLVKLNREDLLRKQRTFDNGSIPHQIHLGELHAILRRQEDFYPFLKDNREKIEKILTFRIPYYVGPLA
RGNSRFAWMTRKSEETITPWNFEEVVDKGASAQSFIERMTNFDKNLPNEKVLPKHSLLYEYFTVYNELTKVKYVTE
GMRKPAFLSGEQKKAIVDLLFKINRKVTVKQLKEDYFKKIECFDSVEISGVEDRFNASLGTYHDLLKIIKDKDFLD
NEENEDILEDIVLTLTLFEDREMIEERLKTYAHLFDDKVMKQLKRRRYTGWGRLSRKLINGIRDKQSGKTILDFLK
SDGFANRNFMQLIHDDSLTFKEDIQKAQVSGQGDSLHEHIANLAGSPAIKKGILQTVKVVDELVKVMGRHKPENIV
IEMARENQTTQKGQKNSRERMKRIEEGIKELGSQILKEHPVENTQLQNEKLYLYYLQNGRDMYVDQELDINRLSDY
DVDHIVPQSFLKDDSIDNKVLTRSDKNRGKSDNVPSEEVVKKMKNYWRQLLNAKLITQRKFDNLTKAERGGLSELD
KAGFIKRQLVETRQITKHVAQILDSRMNTKYDENDKLIREVKVITLKSKLVSDFRKDFQFYKVREINNYHHAHDAY
LNAVVGTALIKKYPKLESEFVYGDYKVYDVRKMIAKSEQEIGKATAKYFFYSNIMNFFKTEITLANGEIRKRPLIE
TNGETGEIVWDKGRDFATVRKVLSMPQVNIVKKTEVQTGGFSKESILPKRNSDKLIARKKDWDPKKYGGFDSPTVA
YSVLVVAKVEKGKSKKLKSVKELLGITIMERSSFEKNPIDFLEAKGYKEVKKDLIIKLPKYSLFELENGRKRMLAS
AGELQKGNELALPSKYVNFLYLASHYEKLKGSPEDNEQKQLFVEQHKHYLDEIIEQISEFSKRVILADANLDKVLS
AYNKHRDKPIREQAENIIHLFTLTNLGAPAAFKYFDTTIDRKRYTSTKEVLDATLIHQSITGLYETRIDLSQLGGD
MVSKGEEDNMAIIKEFMRFKVHMEGSVNGHEFEIEGEGEGRPYEGTQTAKLKVTKGGPLPFAWDILSPQFMYGSKA
YVKHPADIPDYLKLSFPEGFKWERVMNFEDGGVVTVTQDSSLQDGEFIYKVKLRGTNFPSDGPVMQKKTMGWEASS
ERMYPEDGALKGEIKQRLKLKDGGHYDAEVKTTYKAKKPVQLPGAYNVNIKLDITSHNEDYTIVEQYERAEGRHST
GGMDELYK
SEQ ID NO: 316 (AsCas12a Protein-mCherry)
MTQFEGFTNLYQVSKTLRFELIPQGKTLKHIQEQGFIEEDKARNDHYKELKPIIDRIYKTYADQCLQLVQLDWENLS
AAIDSYRKEKTEETRNALIEEQATYRNAIHDYFIGRTDNLTDAINKRHAEIYKGLFKAELFNGKVLKQLGTVTTTEH
ENALLRSFDKETTYFSGFYENRKNVESAEDISTAIPHRIVQDNFPKEKENCHIFTRLITAVPSLREHFENVKKAIGI
FVSTSIEEVFSFPFYNQLLTQTQIDLYNQLLGGISREAGTEKIKGLNEVLNLAIQKNDETAHIIASLPHRFIPLFKQ
ILSDRNTLSFILEEFKSDEEVIQSFCKYKTLLRNENVLETAEALFNELNSIDLTHIFISHKKLETISSALCDHWDTL
RNALYERRISELTGKITKSAKEKVQRSLKHEDINLQEIISAAGKELSEAFKQKTSEILSHAHAALDQPLPTTLKKQE
EKEILKSQLDSLLGLYHLLDWFAVDESNEVDPEFSARLTGIKLEMEPSLSFYNKARNYATKKPYSVEKFKLNFQMPT
LASGWDVNKEKNNGAILFVKNGLYYLGIMPKQKGRYKALSFEPTEKTSEGFDKMYYDYFPDAAKMIPKCSTQLKAVT
AHFQTHTTPILLSNNFIEPLEITKEIYDLNNPEKEPKKFQTAYAKKTGDQKGYREALCKWIDFTRDFLSKYTKTTSI
DLSSLRPSSQYKDLGEYYAELNPLLYHISFQRIAEKEIMDAVETGKLYLFQIYNKDFAKGHHGKPNLHTLYWTGLFS
PENLAKTSIKLNGQAELFYRPKSRMKRMAHRLGEKMLNKKLKDQKTPIPDTLYQELYDYVNHRLSHDLSDEARALLP
NVITKEVSHEIIKDRRFTSDKEFFHVPITLNYQAANSPSKFNQRVNAYLKEHPETPIIGIDRGERNLIYITVIDSTG
KILEQRSLNTIQQFDYQKKLDNREKERVAARQAWSVVGTIKDLKQGYLSQVIHEIVDLMIHYQAVVVLENLNFGFKS
KRTGIAEKAVYQQFEKMLIDKLNCLVLKDYPAEKVGGVLNPYQLTDQFTSFAKMGTQSGELFYVPAPYTSKIDPLTG
FVDPFVWKTIKNHESRKHFLEGFDFLHYDVKTGDFILHFKMNRNLSFQRGLPGEMPAWDIVFEKNETQFDAKGTPFI
AGKRIVPVIENHRFTGRYRDLYPANELIALLEEKGIVFRDGSNILPKLLENDDSHAIDTMVALIRSVLQMRNSNAAT
GEDYINSPVRDLNGVCFDSRFQNPEWPMDADANGAYHIALKGQLLLNHLKESKDLKLQNGISNQDWLAYIQELRNMV
SKGEEDNMAIIKEFMRFKVHMEGSVNGHEFEIEGEGEGRPYEGTQTAKLKVTKGGPLPFAWDILSPQFMYGSKAYVK
HPADIPDYLKLSFPEGFKWERVMNFEDGGVVTVTQDSSLQDGEFIYKVKLRGTNFPSDGPVMQKKTMGWEASSERMY
PEDGALKGEIKQRLKLKDGGHYDAEVKTTYKAKKPVQLPGAYNVNIKLDITSHNEDYTIVEQYERAEGRHSTGGMDE
LYK
SEQ ID NO: 317 (LbCas12a Protein-mCherry)
MSKLEKFTNCYSLSKTLRFKAIPVGKTQENIDNKRLLVEDEKRAEDYKGVKKLLDRYYLSFINDVLHSIKLKNLNNY
ISLFRKKTRTEKENKELENLEINLRKEIAKAFKGNEGYKSLFKKDIIETILPEFLDDKDEIALVNSFNGFTTAFTGF
FDNRENMESEEAKSTSIAFRCINENLTRYISNMDIFEKVDAIFDKHEVQEIKEKILNSDYDVEDFFEGEFFNFVLTQ
EGIDVYNAIIGGFVTESGEKIKGLNEYINLYNQKTKQKLPKFKPLYKQVLSDRESLSFYGEGYTSDEEVLEVFRNTL
NKNSEIFSSIKKLEKLFKNFDEYSSAGIFVKNGPAISTISKDIFGEWNVIRDKWNAEYDDIHLKKKAVVTEKYEDDR
RKSFKKIGSFSLEQLQEYADADLSVVEKLKEIIIQKVDEIYKVYGSSEKLFDADFVLEKSLKKNDAVVAIMKDLLDS
VKSFENYIKAFFGEGKETNRDESFYGDFVLAYDILLKVDHIYDAIRNYVTQKPYSKDKFKLYFQNPQFMGGWDKDKE
TDYRATILRYGSKYYLAIMDKKYAKCLQKIDKDDVNGNYEKINYKLLPGPNKMLPKVFFSKKWMAYYNPSEDIQKIY
KNGTFKKGDMFNLNDCHKLIDFFKDSISRYPKWSNAYDFNFSETEKYKDIAGFYREVEEQGYKVSFESASKKEVDKL
VEEGKLYMFQIYNKDFSDKSHGTPNLHTMYFKLLFDENNHGQIRLSGGAELFMRRASLKKEELVVHPANSPIANKNP
DNPKKITTLSYDVYKDKRESEDQYELHIPIAINKCPKNIFKINTEVRVLLKHDDNPYVIGIDRGERNLLYIVVVDGK
GNIVEQYSLNEIINNFNGIRIKTDYHSLLDKKEKERFEARQNWTSIENIKELKAGYISQVVHKICELVEKYDAVIAL
EDLNSGFKNSRVKVEKQVYQKFEKMLIDKLNYMVDKKSNPCATGGALKGYQITNKFESFKSMSTQNGFIFYIPAWLT
SKIDPSTGFVNLLKTKYTSIADSKKFISSFDRIMYVPEEDLFEFALDYKNFSRTDADYIKKWKLYSYGNRIRIFRNP
KKNNVEDWEEVCLTSAYKELENKYGINYQQGDIRALLCEQSDKAFYSSFMALMSLMLQMRNSITGRTDVDFLISPVK
NSDGIFYDSRNYEAQENAILPKNADANGAYNIARKVLWAIGQFKKAEDEKLDKVKIAISNKEWLEYAQTSVKHMVSK
GEEDNMAIIKEFMRFKVHMEGSVNGHEFEIEGEGEGRPYEGTQTAKLKVTKGGPLPFAWDILSPQFMYGSKAYVKHP
ADIPDYLKLSFPEGFKWERVMNFEDGGVVTVTQDSSLQDGEFIYKVKLRGTNFPSDGPVMQKKTMGWEASSERMYPE
DGALKGEIKQRLKLKDGGHYDAEVKTTYKAKKPVQLPGAYNVNIKLDITSHNEDYTIVEQYERAEGRHSTGGMDELY
K
SEQ ID NO: 318 (LbCas12a (E795L) Protein-mCherry)
MSKLEKFTNCYSLSKTLRFKAIPVGKTQENIDNKRLLVEDEKRAEDYKGVKKLLDRYYLSFINDVLHSIKLKNLNNY
ISLFRKKTRTEKENKELENLEINLRKEIAKAFKGNEGYKSLFKKDIIETILPEFLDDKDEIALVNSFNGFTTAFTGF
FDNRENMFSEEAKSTSIAFRCINENLTRYISNMDIFEKVDAIFDKHEVQEIKEKILNSDYDVEDFFEGEFFNEVLTQ
EGIDVYNAIIGGFVTESGEKIKGLNEYINLYNQKTKQKLPKFKPLYKQVLSDRESLSFYGEGYTSDEEVLEVERNTL
NKNSEIFSSIKKLEKLFKNFDEYSSAGIFVKNGPAISTISKDIFGEWNVIRDKWNAEYDDIHLKKKAVVTEKYEDDR
RKSFKKIGSFSLEQLQEYADADLSVVEKLKEIIIQKVDEIYKVYGSSEKLFDADFVLEKSLKKNDAVVAIMKDLLDS
VKSFENYIKAFFGEGKETNRDESFYGDFVLAYDILLKVDHIYDAIRNYVTQKPYSKDKFKLYFQNPQFMGGWDKDKE
TDYRATILRYGSKYYLAIMDKKYAKCLQKIDKDDVNGNYEKINYKLLPGPNKMLPKVFFSKKWMAYYNPSEDIQKIY
KNGTFKKGDMFNLNDCHKLIDFFKDSISRYPKWSNAYDENFSETEKYKDIAGFYREVEEQGYKVSFESASKKEVDKL
VEEGKLYMFQIYNKDFSDKSHGTPNLHTMYFKLLFDENNHGQIRLSGGAELFMRRASLKKEELVVHPANSPIANKNP
DNPKKTTTLSYDVYKDKRESEDQYLLHIPIAINKCPKNIFKINTEVRVLLKHDDNPYVIGIDRGERNLLYIVVVDGK
GNIVEQYSLNEIINNFNGIRIKTDYHSLLDKKEKERFEARQNWTSIENIKELKAGYISQVVHKICELVEKYDAVIAL
EDLNSGFKNSRVKVEKQVYQKFEKMLIDKLNYMVDKKSNPCATGGALKGYQITNKFESFKSMSTQNGFIFYIPAWLT
SKIDPSTGFVNLLKTKYTSIADSKKFISSFDRIMYVPEEDLFEFALDYKNFSRTDADYIKKWKLYSYGNRIRIFRNP
KKNNVFDWEEVCLTSAYKELFNKYGINYQQGDIRALLCEQSDKAFYSSFMALMSLMLQMRNSITGRTDVDFLISPVK
NSDGIFYDSRNYEAQENAILPKNADANGAYNIARKVLWAIGQFKKAEDEKLDKVKIAISNKEWLEYAQTSVKHMVSK
GEEDNMAIIKEFMRFKVHMEGSVNGHEFEIEGEGEGRPYEGTQTAKLKVTKGGPLPFAWDILSPQFMYGSKAYVKHP
ADIPDYLKLSFPEGFKWERVMNFEDGGVVTVTQDSSLQDGEFIYKVKLRGTNFPSDGPVMQKKTMGWEASSERMYPE
DGALKGEIKQRLKLKDGGHYDAEVKTTYKAKKPVQLPGAYNVNIKLDITSHNEDYTIVEQYERAEGRHSTGGMDELY
K

### Exemplary DNA Sequences Encoding Cas9 Protein Chimeras

(Wild-type Cas9 protein DNA sequence)
SEQ ID NO: 347
ATGGACAAAAAGTACTCTATTGGCCTGGATATCGGGACCAACAGCGTCGGGTGGGCTGTTATCACCGACGAGTATAA
AGTACCTTCGAAAAAGTTCAAAGTGCTGGGCAACACCGATCGCCATTCAATCAAAAAGAACTTGATTGGTGCGCTGT
TGTTTGACTCCGGGGAAACCGCCGAGGCGACTCGCCTTAAACGTACAGCACGTCGCCGGTACACTCGGCGTAAGAAT
CGCATTTGCTATTTGCAGGAAATCTTTAGCAACGAGATGGCAAAAGTCGATGACTCGTTTTTCCACCGCCTCGAGGA
AAGCTTTCTGGTGGAGGAAGACAAAAAGCATGAGCGTCACCCGATCTTCGGCAACATTGTCGATGAAGTAGCGTATC
ATGAAAAATACCCAACCATTTACCACTTACGCAAAAAGCTGGTGGACAGCACTGACAAAGCTGATTTGCGCCTTATC
TATTTAGCCCTGGCACATATGATTAAGTTTCGTGGTCACTTCCTGATCGAAGGAGACTTAAATCCCGACAACAGTGA
TGTTGATAAATTGTTTATTCAGCTTGTCCAAACTTACAATCAACTGTTCGAGGAAAACCCGATCAATGCCTCCGGTG
TGGATGCAAAAGCCATTTTAAGTGCACGCCTTAGCAAGTCCCGTCGCTTAGAAAACCTTATCGCGCAGCTGCCCGGC
GAGAAAAAGAATGGTTTGTTTGGGAACCTTATTGCCTTGAGCTTAGGCCTCACCCCGAATTTCAAAAGTAATTTCGA
TCTTGCAGAAGACGCCAAATTACAACTGTCGAAGGATACTTATGATGACGATCTCGATAATCTGTTAGCGCAGATTG
GTGACCAATACGCCGATCTTTTTCTGGCGGCTAAAAATCTGAGCGACGCCATCTTGCTTTCGGATATTCTCCGCGTT
AACACCGAAATCACGAAAGCGCCTCTTAGTGCCAGCATGATTAAACGTTATGATGAACACCACCAGGACCTGACCTT
ACTCAAAGCGTTGGTTCGCCAGCAACTGCCAGAGAAGTACAAAGAAATCTTCTTTGATCAGTCAAAGAATGGTTATG
CCGGCTATATTGACGGGGGTGCAAGCCAAGAGGAATTCTACAAATTTATCAAGCCTATTCTGGAGAAAATGGATGGC
ACCGAAGAGTTATTGGTGAAGCTTAACCGTGAAGACCTCCTGCGGAAACAGCGCACATTCGATAATGGTTCGATCCC
ACACCAAATCCATTTGGGGGAGTTACACGCTATTTTGCGTCGCCAGGAAGACTTTTACCCTTTCCTGAAGGATAACC
GGGAGAAAATTGAGAAGATCCTTACCTTTCGTATTCCGTATTACGTAGGCCCCTTAGCACGGGGTAATAGCCGTTTC
GCGTGGATGACACGGAAGTCGGAAGAGACGATCACCCCGTGGAACTTCGAAGAGGTAGTCGACAAGGGCGCATCAGC
GCAGTCTTTTATTGAACGTATGACGAATTTCGATAAAAACTTGCCCAATGAGAAGGTGCTTCCGAAACATTCCTTGT
TATATGAATATTTTACAGTTTACAACGAGCTGACCAAGGTTAAATACGTGACGGAAGGAATGCGCAAGCCCGCTTTT
CTTAGCGGTGAGCAAAAAAAGGCGATCGTCGACCTGTTATTCAAAACGAATCGTAAGGTGACTGTAAAGCAACTCAA
AGAAGATTACTTCAAAAAGATTGAGTGCTTCGACAGCGTCGAAATCTCTGGGGTAGAGGATCGGTTTAACGCAAGTT
TAGGTACCTACCATGACCTGCTTAAAATCATTAAGGATAAAGACTTCTTAGATAATGAAGAGAACGAAGATATTCTC
GAGGACATCGTCTTGACGTTAACCTTATTTGAGGATCGTGAAATGATTGAGGAACGCCTCAAAACTTATGCCCACCT
GTTCGACGATAAGGTGATGAAGCAGCTGAAACGTCGGCGCTACACAGGATGGGGCCGCTTGAGTCGCAAACTTATTA
ACGGAATCCGTGACAAGCAATCCGGCAAAACGATTCTGGATTTCTTGAAGTCGGACGGATTTGCTAATCGCAACTTC
ATGCAGTTGATCCATGATGACTCCCTGACTTTTAAAGAGGATATTCAAAAGGCGCAGGTTAGTGGTCAAGGCGACAG
CTTACACGAACACATCGCAAATTTGGCTGGTTCGCCGGCCATTAAAAAGGGGATCCTCCAGACCGTGAAAGTTGTAG
ATGAGCTTGTTAAGGTCATGGGTCGTCATAAGCCCGAAAACATCGTGATTGAAATGGCGCGGGAGAATCAAACGACC
CAGAAAGGACAAAAGAATAGCCGTGAACGGATGAAGCGGATCGAGGAAGGCATTAAAGAGCTGGGGTCTCAAATCTT
GAAGGAACACCCTGTGGAGAACACTCAGCTCCAAAATGAAAAACTTTACCTGTACTATTTGCAGAACGGACGCGATA
TGTACGTGGACCAAGAGTTGGATATTAATCGGCTGAGTGACTACGACGTTGATCATATCGTCCCGCAGAGCTTCCTC
AAAGACGATTCTATTGACAATAAGGTACTGACGCGCTCTGATAAAAACCGTGGTAAGTCGGACAACGTGCCCTCCGA
AGAGGTTGTGAAAAAGATGAAAAATTATTGGCGCCAGCTTTTAAACGCGAAGCTGATCACACAACGTAAATTCGATA
ATTTGACCAAGGCTGAACGGGGTGGCCTGAGCGAGTTAGATAAGGCAGGATTTATTAAACGCCAGTTAGTGGAGACT
CGTCAAATCACCAAACATGTCGCGCAGATTTTGGACAGCCGGATGAACACCAAGTACGATGAAAATGACAAACTGAT
CCGTGAGGTGAAAGTCATTACTCTGAAGTCCAAATTAGTTAGTGATTTCCGGAAGGACTTTCAATTCTACAAAGTCC
GTGAAATTAATAACTATCATCACGCACATGACGCGTACCTGAATGCAGTGGTTGGGACCGCCCTTATCAAGAAATAT
CCTAAGCTGGAGTCGGAGTTTGTCTATGGCGACTATAAGGTATACGATGTTCGCAAAATGATTGCGAAATCTGAGCA
GGAGATCGGTAAGGCAACCGCAAAATATTTCTTTTACTCAAACATTATGAATTTCTTTAAGACAGAAATCACTCTGG
CCAACGGGGAGATTCGCAAACGTCCGTTGATCGAAACAAACGGCGAGACTGGCGAAATTGTTTGGGACAAAGGGCGT
GATTTCGCGACGGTGCGCAAGGTACTGAGCATGCCTCAAGTCAATATTGTTAAGAAAACCGAAGTGCAGACGGGCGG
GTTTTCCAAGGAAAGCATCTTACCCAAACGTAATTCAGATAAACTTATTGCACGCAAAAAGGACTGGGATCCGAAAA
AGTATGGAGGCTTCGACAGTCCAACCGTAGCCTACTCTGTTCTCGTTGTAGCGAAAGTAGAAAAGGGTAAATCCAAG
AAACTGAAATCTGTCAAGGAGTTGCTTGGAATCACCATTATGGAGCGTAGCTCCTTCGAGAAGAACCCGATTGACTT
TCTGGAAGCCAAAGGATATAAAGAGGTCAAGAAAGATCTTATCATTAAGCTGCCTAAGTATTCACTCTTCGAGCTGG
AAAATGGTCGTAAACGCATGCTCGCTTCTGCCGGCGAGTTGCAGAAGGGCAATGAATTAGCACTTCCATCAAAGTAC
GTTAACTTCCTGTATTTGGCCAGCCATTACGAGAAACTGAAGGGGTCTCCAGAGGACAACGAACAGAAACAATTATT
TGTAGAGCAGCACAAGCATTATCTTGATGAAATCATTGAGCAAATTTCCGAATTCAGTAAACGCGTAATCCTGGCCG
ATGCAAACCTCGACAAGGTGCTGAGCGCTTACAATAAGCATCGCGACAAACCTATCCGTGAGCAGGCTGAAAATATC
ATTCACCTGTTCACATTAACGAACCTGGGCGCTCCGGCCGCTTTTAAATATTTCGACACGACAATCGACCGTAAGCG
CTATACCAGTACGAAAGAAGTGTTGGATGCGACCCTTATTCACCAGTCAATTACAGGATTATATGAGACCCGTATCG
ACCTTAGCCAATTAGGTGGGGAT
(Cas9-GSAGSAAGSGEF-(SEQ ID NO: 6)-eGFP chimera DNA sequence)
SEQ ID NO: 348
ATGGACAAAAAGTACTCTATTGGCCTGGATATCGGGACCAACAGCGTCGGGTGGGCTGTTATCACCGACGAGTATAA
AGTACCTTCGAAAAAGTTCAAAGTGCTGGGCAACACCGATCGCCATTCAATCAAAAAGAACTTGATTGGTGCGCTGT
TGTTTGACTCCGGGGAAACCGCCGAGGCGACTCGCCTTAAACGTACAGCACGTCGCCGGTACACTCGGCGTAAGAAT
CGCATTTGCTATTTGCAGGAAATCTTTAGCAACGAGATGGCAAAAGTCGATGACTCGTTTTTCCACCGCCTCGAGGA
AAGCTTTCTGGTGGAGGAAGACAAAAAGCATGAGCGTCACCCGATCTTCGGCAACATTGTCGATGAAGTAGCGTATC
ATGAAAAATACCCAACCATTTACCACTTACGCAAAAAGCTGGTGGACAGCACTGACAAAGCTGATTTGCGCCTTATC
TATTTAGCCCTGGCACATATGATTAAGTTTCGTGGTCACTTCCTGATCGAAGGAGACTTAAATCCCGACAACAGTGA
TGTTGATAAATTGTTTATTCAGCTTGTCCAAACTTACAATCAACTGTTCGAGGAAAACCCGATCAATGCCTCCGGTG
TGGATGCAAAAGCCATTTTAAGTGCACGCCTTAGCAAGTCCCGTCGCTTAGAAAACCTTATCGCGCAGCTGCCCGGC
GAGAAAAAGAATGGTTTGTTTGGGAACCTTATTGCCTTGAGCTTAGGCCTCACCCCGAATTTCAAAAGTAATTTCGA
TCTTGCAGAAGACGCCAAATTACAACTGTCGAAGGATACTTATGATGACGATCTCGATAATCTGTTAGCGCAGATTG
GTGACCAATACGCCGATCTTTTTCTGGCGGCTAAAAATCTGAGCGACGCCATCTTGCTTTCGGATATTCTCCGCGTT
AACACCGAAATCACGAAAGCGCCTCTTAGTGCCAGCATGATTAAACGTTATGATGAACACCACCAGGACCTGACCTT
ACTCAAAGCGTTGGTTCGCCAGCAACTGCCAGAGAAGTACAAAGAAATCTTCTTTGATCAGTCAAAGAATGGTTATG
CCGGCTATATTGACGGGGGTGCAAGCCAAGAGGAATTCTACAAATTTATCAAGCCTATTCTGGAGAAAATGGATGGC
ACCGAAGAGTTATTGGTGAAGCTTAACCGTGAAGACCTCCTGCGGAAACAGCGCACATTCGATAATGGTTCGATCCC
ACACCAAATCCATTTGGGGGAGTTACACGCTATTTTGCGTCGCCAGGAAGACTTTTACCCTTTCCTGAAGGATAACC
GGGAGAAAATTGAGAAGATCCTTACCTTTCGTATTCCGTATTACGTAGGCCCCTTAGCACGGGGTAATAGCCGTTTC
GCGTGGATGACACGGAAGTCGGAAGAGACGATCACCCCGTGGAACTTCGAAGAGGTAGTCGACAAGGGCGCATCAGC
GCAGTCTTTTATTGAACGTATGACGAATTTCGATAAAAACTTGCCCAATGAGAAGGTGCTTCCGAAACATTCCTTGT
TATATGAATATTTTACAGTTTACAACGAGCTGACCAAGGTTAAATACGTGACGGAAGGAATGCGCAAGCCCGCTTTT
CTTAGCGGTGAGCAAAAAAAGGCGATCGTCGACCTGTTATTCAAAACGAATCGTAAGGTGACTGTAAAGCAACTCAA
AGAAGATTACTTCAAAAAGATTGAGTGCTTCGACAGCGTCGAAATCTCTGGGGTAGAGGATCGGTTTAACGCAAGTT
TAGGTACCTACCATGACCTGCTTAAAATCATTAAGGATAAAGACTTCTTAGATAATGAAGAGAACGAAGATATTCTC
GAGGACATCGTCTTGACGTTAACCTTATTTGAGGATCGTGAAATGATTGAGGAACGCCTCAAAACTTATGCCCACCT
GTTCGACGATAAGGTGATGAAGCAGCTGAAACGTCGGCGCTACACAGGATGGGGCCGCTTGAGTCGCAAACTTATTA
ACGGAATCCGTGACAAGCAATCCGGCAAAACGATTCTGGATTTCTTGAAGTCGGACGGATTTGCTAATCGCAACTTC
ATGCAGTTGATCCATGATGACTCCCTGACTTTTAAAGAGGATATTCAAAAGGCGCAGGTTAGTGGTCAAGGCGACAG
CTTACACGAACACATCGCAAATTTGGCTGGTTCGCCGGCCATTAAAAAGGGGATCCTCCAGACCGTGAAAGTTGTAG
ATGAGCTTGTTAAGGTCATGGGTCGTCATAAGCCCGAAAACATCGTGATTGAAATGGCGCGGGAGAATCAAACGACC
CAGAAAGGACAAAAGAATAGCCGTGAACGGATGAAGCGGATCGAGGAAGGCATTAAAGAGCTGGGGTCTCAAATCTT
GAAGGAACACCCTGTGGAGAACACTCAGCTCCAAAATGAAAAACTTTACCTGTACTATTTGCAGAACGGACGCGATA
TGTACGTGGACCAAGAGTTGGATATTAATCGGCTGAGTGACTACGACGTTGATCATATCGTCCCGCAGAGCTTCCTC
AAAGACGATTCTATTGACAATAAGGTACTGACGCGCTCTGATAAAAACCGTGGTAAGTCGGACAACGTGCCCTCCGA
AGAGGTTGTGAAAAAGATGAAAAATTATTGGCGCCAGCTTTTAAACGCGAAGCTGATCACACAACGTAAATTCGATA
ATTTGACCAAGGCTGAACGGGGTGGCCTGAGCGAGTTAGATAAGGCAGGATTTATTAAACGCCAGTTAGTGGAGACT
CGTCAAATCACCAAACATGTCGCGCAGATTTTGGACAGCCGGATGAACACCAAGTACGATGAAAATGACAAACTGAT
CCGTGAGGTGAAAGTCATTACTCTGAAGTCCAAATTAGTTAGTGATTTCCGGAAGGACTTTCAATTCTACAAAGTCC
GTGAAATTAATAACTATCATCACGCACATGACGCGTACCTGAATGCAGTGGTTGGGACCGCCCTTATCAAGAAATAT
CCTAAGCTGGAGTCGGAGTTTGTCTATGGCGACTATAAGGTATACGATGTTCGCAAAATGATTGCGAAATCTGAGCA
GGAGATCGGTAAGGCAACCGCAAAATATTTCTTTTACTCAAACATTATGAATTTCTTTAAGACAGAAATCACTCTGG
CCAACGGGGAGATTCGCAAACGTCCGTTGATCGAAACAAACGGCGAGACTGGCGAAATTGTTTGGGACAAAGGGCGT
GATTTCGCGACGGTGCGCAAGGTACTGAGCATGCCTCAAGTCAATATTGTTAAGAAAACCGAAGTGCAGACGGGCGG
GTTTTCCAAGGAAAGCATCTTACCCAAACGTAATTCAGATAAACTTATTGCACGCAAAAAGGACTGGGATCCGAAAA
AGTATGGAGGCTTCGACAGTCCAACCGTAGCCTACTCTGTTCTCGTTGTAGCGAAAGTAGAAAAGGGTAAATCCAAG
AAACTGAAATCTGTCAAGGAGTTGCTTGGAATCACCATTATGGAGCGTAGCTCCTTCGAGAAGAACCCGATTGACTT
TCTGGAAGCCAAAGGATATAAAGAGGTCAAGAAAGATCTTATCATTAAGCTGCCTAAGTATTCACTCTTCGAGCTGG
AAAATGGTCGTAAACGCATGCTCGCTTCTGCCGGCGAGTTGCAGAAGGGCAATGAATTAGCACTTCCATCAAAGTAC
GTTAACTTCCTGTATTTGGCCAGCCATTACGAGAAACTGAAGGGGTCTCCAGAGGACAACGAACAGAAACAATTATT
TGTAGAGCAGCACAAGCATTATCTTGATGAAATCATTGAGCAAATTTCCGAATTCAGTAAACGCGTAATCCTGGCCG
ATGCAAACCTCGACAAGGTGCTGAGCGCTTACAATAAGCATCGCGACAAACCTATCCGTGAGCAGGCTGAAAATATC
ATTCACCTGTTCACATTAACGAACCTGGGCGCTCCGGCCGCTTTTAAATATTTCGACACGACAATCGACCGTAAGCG
CTATACCAGTACGAAAGAAGTGTTGGATGCGACCCTTATTCACCAGTCAATTACAGGATTATATGAGACCCGTATCG
ACCTTAGCCAATTAGGTGGGGATGGTAGCGCAGGTAGTGCAGCAGGTAGCGGTGAATTTATGGTTAGCAAAGGTGAA
GAACTGTTTACCGGCGTTGTGCCGATTCTGGTGGAACTGGATGGTGATGTGAATGGCCATAAATTTAGCGTTagcGG
CGAAGGCGAAGGTGATGCGACCtatGGTAAACTGACCCTGAAATTTATTTGCACCACCGGTAAACTGCCGGTTCCGT
GGCCGACCCTGGTGACCACCCTGACCTATGGCGTTCAGTGCTTTAGCCGCTATCCGGATCATATGAAAcagCATGAT
TTCTTTAAAAGCGCGATGCCGGAAGGCTATGTGCAGGAACGTACCATTtttTTCAAAGATGATGGCaacTATAAAAC
CCGTGCGGAAGTTAAATTTGAAGGCGATACCCTGGTGAACCGCATTGAACTGAAAGGTATTGATTTTAAAGAAGATG
GCAACATTCTGGGTCATAAACTGGAATATAATtacAACAGCCATAATGTGTATATTatgGCCGATAAACAGAAAAAT
GGCATCAAAgtgAACTTTAAAATCCGTCACAACattGAAGATGGTAGCGTGCAGCTGGCGGATCATTATCAGCAGAA
TACCCCGATTGGTGATGGCCCGGTGCTGCTGCCGGATAATCATTATCTGAGCACCCAGAGCgcgCTGAGCAAAGATC
CGAATGAAAAACGTGATCATATGGTGCTGCTGGAATTTGTTACCGCCGCGGGCATTACCctgGGTATGGATGAACTG
TATAAA
(Cas9-(GGGGS)₄-(SEQ ID NO: 7)eGFP chimera DNA sequence)
SEQ ID NO: 349
ATGGACAAAAAGTACTCTATTGGCCTGGATATCGGGACCAACAGCGTCGGGTGGGCTGTTATCACCGACGAGTATAA
AGTACCTTCGAAAAAGTTCAAAGTGCTGGGCAACACCGATCGCCATTCAATCAAAAAGAACTTGATTGGTGCGCTGT
TGTTTGACTCCGGGGAAACCGCCGAGGCGACTCGCCTTAAACGTACAGCACGTCGCCGGTACACTCGGCGTAAGAAT
CGCATTTGCTATTTGCAGGAAATCTTTAGCAACGAGATGGCAAAAGTCGATGACTCGTTTTTCCACCGCCTCGAGGA
AAGCTTTCTGGTGGAGGAAGACAAAAAGCATGAGCGTCACCCGATCTTCGGCAACATTGTCGATGAAGTAGCGTATC
ATGAAAAATACCCAACCATTTACCACTTACGCAAAAAGCTGGTGGACAGCACTGACAAAGCTGATTTGCGCCTTATC
TATTTAGCCCTGGCACATATGATTAAGTTTCGTGGTCACTTCCTGATCGAAGGAGACTTAAATCCCGACAACAGTGA
TGTTGATAAATTGTTTATTCAGCTTGTCCAAACTTACAATCAACTGTTCGAGGAAAACCCGATCAATGCCTCCGGTG
TGGATGCAAAAGCCATTTTAAGTGCACGCCTTAGCAAGTCCCGTCGCTTAGAAAACCTTATCGCGCAGCTGCCCGGC
GAGAAAAAGAATGGTTTGTTTGGGAACCTTATTGCCTTGAGCTTAGGCCTCACCCCGAATTTCAAAAGTAATTTCGA
TCTTGCAGAAGACGCCAAATTACAACTGTCGAAGGATACTTATGATGACGATCTCGATAATCTGTTAGCGCAGATTG
GTGACCAATACGCCGATCTTTTTCTGGCGGCTAAAAATCTGAGCGACGCCATCTTGCTTTCGGATATTCTCCGCGTT
AACACCGAAATCACGAAAGCGCCTCTTAGTGCCAGCATGATTAAACGTTATGATGAACACCACCAGGACCTGACCTT
ACTCAAAGCGTTGGTTCGCCAGCAACTGCCAGAGAAGTACAAAGAAATCTTCTTTGATCAGTCAAAGAATGGTTATG
CCGGCTATATTGACGGGGGTGCAAGCCAAGAGGAATTCTACAAATTTATCAAGCCTATTCTGGAGAAAATGGATGGC
ACCGAAGAGTTATTGGTGAAGCTTAACCGTGAAGACCTCCTGCGGAAACAGCGCACATTCGATAATGGTTCGATCCC
ACACCAAATCCATTTGGGGGAGTTACACGCTATTTTGCGTCGCCAGGAAGACTTTTACCCTTTCCTGAAGGATAACC
GGGAGAAAATTGAGAAGATCCTTACCTTTCGTATTCCGTATTACGTAGGCCCCTTAGCACGGGGTAATAGCCGTTTC
GCGTGGATGACACGGAAGTCGGAAGAGACGATCACCCCGTGGAACTTCGAAGAGGTAGTCGACAAGGGCGCATCAGC
GCAGTCTTTTATTGAACGTATGACGAATTTCGATAAAAACTTGCCCAATGAGAAGGTGCTTCCGAAACATTCCTTGT
TATATGAATATTTTACAGTTTACAACGAGCTGACCAAGGTTAAATACGTGACGGAAGGAATGCGCAAGCCCGCTTTT
CTTAGCGGTGAGCAAAAAAAGGCGATCGTCGACCTGTTATTCAAAACGAATCGTAAGGTGACTGTAAAGCAACTCAA
AGAAGATTACTTCAAAAAGATTGAGTGCTTCGACAGCGTCGAAATCTCTGGGGTAGAGGATCGGTTTAACGCAAGTT
TAGGTACCTACCATGACCTGCTTAAAATCATTAAGGATAAAGACTTCTTAGATAATGAAGAGAACGAAGATATTCTC
GAGGACATCGTCTTGACGTTAACCTTATTTGAGGATCGTGAAATGATTGAGGAACGCCTCAAAACTTATGCCCACCT
GTTCGACGATAAGGTGATGAAGCAGCTGAAACGTCGGCGCTACACAGGATGGGGCCGCTTGAGTCGCAAACTTATTA
ACGGAATCCGTGACAAGCAATCCGGCAAAACGATTCTGGATTTCTTGAAGTCGGACGGATTTGCTAATCGCAACTTC
ATGCAGTTGATCCATGATGACTCCCTGACTTTTAAAGAGGATATTCAAAAGGCGCAGGTTAGTGGTCAAGGCGACAG
CTTACACGAACACATCGCAAATTTGGCTGGTTCGCCGGCCATTAAAAAGGGGATCCTCCAGACCGTGAAAGTTGTAG
ATGAGCTTGTTAAGGTCATGGGTCGTCATAAGCCCGAAAACATCGTGATTGAAATGGCGCGGGAGAATCAAACGACC
CAGAAAGGACAAAAGAATAGCCGTGAACGGATGAAGCGGATCGAGGAAGGCATTAAAGAGCTGGGGTCTCAAATCTT
GAAGGAACACCCTGTGGAGAACACTCAGCTCCAAAATGAAAAACTTTACCTGTACTATTTGCAGAACGGACGCGATA
TGTACGTGGACCAAGAGTTGGATATTAATCGGCTGAGTGACTACGACGTTGATCATATCGTCCCGCAGAGCTTCCTC
AAAGACGATTCTATTGACAATAAGGTACTGACGCGCTCTGATAAAAACCGTGGTAAGTCGGACAACGTGCCCTCCGA
AGAGGTTGTGAAAAAGATGAAAAATTATTGGCGCCAGCTTTTAAACGCGAAGCTGATCACACAACGTAAATTCGATA
ATTTGACCAAGGCTGAACGGGGTGGCCTGAGCGAGTTAGATAAGGCAGGATTTATTAAACGCCAGTTAGTGGAGACT
CGTCAAATCACCAAACATGTCGCGCAGATTTTGGACAGCCGGATGAACACCAAGTACGATGAAAATGACAAACTGAT
CCGTGAGGTGAAAGTCATTACTCTGAAGTCCAAATTAGTTAGTGATTTCCGGAAGGACTTTCAATTCTACAAAGTCC
GTGAAATTAATAACTATCATCACGCACATGACGCGTACCTGAATGCAGTGGTTGGGACCGCCCTTATCAAGAAATAT
CCTAAGCTGGAGTCGGAGTTTGTCTATGGCGACTATAAGGTATACGATGTTCGCAAAATGATTGCGAAATCTGAGCA
GGAGATCGGTAAGGCAACCGCAAAATATTTCTTTTACTCAAACATTATGAATTTCTTTAAGACAGAAATCACTCTGG
CCAACGGGGAGATTCGCAAACGTCCGTTGATCGAAACAAACGGCGAGACTGGCGAAATTGTTTGGGACAAAGGGCGT
GATTTCGCGACGGTGCGCAAGGTACTGAGCATGCCTCAAGTCAATATTGTTAAGAAAACCGAAGTGCAGACGGGCGG
GTTTTCCAAGGAAAGCATCTTACCCAAACGTAATTCAGATAAACTTATTGCACGCAAAAAGGACTGGGATCCGAAAA
AGTATGGAGGCTTCGACAGTCCAACCGTAGCCTACTCTGTTCTCGTTGTAGCGAAAGTAGAAAAGGGTAAATCCAAG
AAACTGAAATCTGTCAAGGAGTTGCTTGGAATCACCATTATGGAGCGTAGCTCCTTCGAGAAGAACCCGATTGACTT
TCTGGAAGCCAAAGGATATAAAGAGGTCAAGAAAGATCTTATCATTAAGCTGCCTAAGTATTCACTCTTCGAGCTGG
AAAATGGTCGTAAACGCATGCTCGCTTCTGCCGGCGAGTTGCAGAAGGGCAATGAATTAGCACTTCCATCAAAGTAC
GTTAACTTCCTGTATTTGGCCAGCCATTACGAGAAACTGAAGGGGTCTCCAGAGGACAACGAACAGAAACAATTATT
TGTAGAGCAGCACAAGCATTATCTTGATGAAATCATTGAGCAAATTTCCGAATTCAGTAAACGCGTAATCCTGGCCG
ATGCAAACCTCGACAAGGTGCTGAGCGCTTACAATAAGCATCGCGACAAACCTATCCGTGAGCAGGCTGAAAATATC
ATTCACCTGTTCACATTAACGAACCTGGGCGCTCCGGCCGCTTTTAAATATTTCGACACGACAATCGACCGTAAGCG
CTATACCAGTACGAAAGAAGTGTTGGATGCGACCCTTATTCACCAGTCAATTACAGGATTATATGAGACCCGTATCG
ACCTTAGCCAATTAGGTGGGGATGGAGGCGGAGGATCAGGCGGTGGCGGAAGTGGTGGAGGTGGGTCGGGAGGTGGT
GGTAGCATGGTTAGCAAAGGTGAAGAACTGTTTACCGGCGTTGTGCCGATTCTGGTGGAACTGGATGGTGATGTGAA
TGGCCATAAATTTAGCGTTagcGGCGAAGGCGAAGGTGATGCGACCtatGGTAAACTGACCCTGAAATTTATTTGCA
CCACCGGTAAACTGCCGGTTCCGTGGCCGACCCTGGTGACCACCCTGACCTATGGCGTTCAGTGCTTTAGCCGCTAT
CCGGATCATATGAAAcagCATGATTTCTTTAAAAGCGCGATGCCGGAAGGCTATGTGCAGGAACGTACCATTtttTT
CAAAGATGATGGCaacTATAAAACCCGTGCGGAAGTTAAATTTGAAGGCGATACCCTGGTGAACCGCATTGAACTGA
AAGGTATTGATTTTAAAGAAGATGGCAACATTCTGGGTCATAAACTGGAATATAATtacAACAGCCATAATGTGTAT
ATTatgGCCGATAAACAGAAAAATGGCATCAAAgtgAACTTTAAAATCCGTCACAACattGAAGATGGTAGCGTGCA
GCTGGCGGATCATTATCAGCAGAATACCCCGATTGGTGATGGCCCGGTGCTGCTGCCGGATAATCATTATCTGAGCA
CCCAGAGCgcgCTGAGCAAAGATCCGAATGAAAAACGTGATCATATGGTGCTGCTGGAATTTGTTACCGCCGCGGGC
ATTACCctgGGTATGGATGAACTGTATAAA
(Cas9-GGGGSEAAAKGGGGS(SEQ ID NO: 37)-eGFP chimera DNA sequence)
SEQ ID NO: 350
ATGGACAAAAAGTACTCTATTGGCCTGGATATCGGGACCAACAGCGTCGGGTGGGCTGTTATCACCGACGAGTATAA
AGTACCTTCGAAAAAGTTCAAAGTGCTGGGCAACACCGATCGCCATTCAATCAAAAAGAACTTGATTGGTGCGCTGT
TGTTTGACTCCGGGGAAACCGCCGAGGCGACTCGCCTTAAACGTACAGCACGTCGCCGGTACACTCGGCGTAAGAAT
CGCATTTGCTATTTGCAGGAAATCTTTAGCAACGAGATGGCAAAAGTCGATGACTCGTTTTTCCACCGCCTCGAGGA
AAGCTTTCTGGTGGAGGAAGACAAAAAGCATGAGCGTCACCCGATCTTCGGCAACATTGTCGATGAAGTAGCGTATC
ATGAAAAATACCCAACCATTTACCACTTACGCAAAAAGCTGGTGGACAGCACTGACAAAGCTGATTTGCGCCTTATC
TATTTAGCCCTGGCACATATGATTAAGTTTCGTGGTCACTTCCTGATCGAAGGAGACTTAAATCCCGACAACAGTGA
TGTTGATAAATTGTTTATTCAGCTTGTCCAAACTTACAATCAACTGTTCGAGGAAAACCCGATCAATGCCTCCGGTG
TGGATGCAAAAGCCATTTTAAGTGCACGCCTTAGCAAGTCCCGTCGCTTAGAAAACCTTATCGCGCAGCTGCCCGGC
GAGAAAAAGAATGGTTTGTTTGGGAACCTTATTGCCTTGAGCTTAGGCCTCACCCCGAATTTCAAAAGTAATTTCGA
TCTTGCAGAAGACGCCAAATTACAACTGTCGAAGGATACTTATGATGACGATCTCGATAATCTGTTAGCGCAGATTG
GTGACCAATACGCCGATCTTTTTCTGGCGGCTAAAAATCTGAGCGACGCCATCTTGCTTTCGGATATTCTCCGCGTT
AACACCGAAATCACGAAAGCGCCTCTTAGTGCCAGCATGATTAAACGTTATGATGAACACCACCAGGACCTGACCTT
ACTCAAAGCGTTGGTTCGCCAGCAACTGCCAGAGAAGTACAAAGAAATCTTCTTTGATCAGTCAAAGAATGGTTATG
CCGGCTATATTGACGGGGGTGCAAGCCAAGAGGAATTCTACAAATTTATCAAGCCTATTCTGGAGAAAATGGATGGC
ACCGAAGAGTTATTGGTGAAGCTTAACCGTGAAGACCTCCTGCGGAAACAGCGCACATTCGATAATGGTTCGATCCC
ACACCAAATCCATTTGGGGGAGTTACACGCTATTTTGCGTCGCCAGGAAGACTTTTACCCTTTCCTGAAGGATAACC
GGGAGAAAATTGAGAAGATCCTTACCTTTCGTATTCCGTATTACGTAGGCCCCTTAGCACGGGGTAATAGCCGTTTC
GCGTGGATGACACGGAAGTCGGAAGAGACGATCACCCCGTGGAACTTCGAAGAGGTAGTCGACAAGGGCGCATCAGC
GCAGTCTTTTATTGAACGTATGACGAATTTCGATAAAAACTTGCCCAATGAGAAGGTGCTTCCGAAACATTCCTTGT
TATATGAATATTTTACAGTTTACAACGAGCTGACCAAGGTTAAATACGTGACGGAAGGAATGCGCAAGCCCGCTTTT
CTTAGCGGTGAGCAAAAAAAGGCGATCGTCGACCTGTTATTCAAAACGAATCGTAAGGTGACTGTAAAGCAACTCAA
AGAAGATTACTTCAAAAAGATTGAGTGCTTCGACAGCGTCGAAATCTCTGGGGTAGAGGATCGGTTTAACGCAAGTT
TAGGTACCTACCATGACCTGCTTAAAATCATTAAGGATAAAGACTTCTTAGATAATGAAGAGAACGAAGATATTCTC
GAGGACATCGTCTTGACGTTAACCTTATTTGAGGATCGTGAAATGATTGAGGAACGCCTCAAAACTTATGCCCACCT
GTTCGACGATAAGGTGATGAAGCAGCTGAAACGTCGGCGCTACACAGGATGGGGCCGCTTGAGTCGCAAACTTATTA
ACGGAATCCGTGACAAGCAATCCGGCAAAACGATTCTGGATTTCTTGAAGTCGGACGGATTTGCTAATCGCAACTTC
ATGCAGTTGATCCATGATGACTCCCTGACTTTTAAAGAGGATATTCAAAAGGCGCAGGTTAGTGGTCAAGGCGACAG
CTTACACGAACACATCGCAAATTTGGCTGGTTCGCCGGCCATTAAAAAGGGGATCCTCCAGACCGTGAAAGTTGTAG
ATGAGCTTGTTAAGGTCATGGGTCGTCATAAGCCCGAAAACATCGTGATTGAAATGGCGCGGGAGAATCAAACGACC
CAGAAAGGACAAAAGAATAGCCGTGAACGGATGAAGCGGATCGAGGAAGGCATTAAAGAGCTGGGGTCTCAAATCTT
GAAGGAACACCCTGTGGAGAACACTCAGCTCCAAAATGAAAAACTTTACCTGTACTATTTGCAGAACGGACGCGATA
TGTACGTGGACCAAGAGTTGGATATTAATCGGCTGAGTGACTACGACGTTGATCATATCGTCCCGCAGAGCTTCCTC
AAAGACGATTCTATTGACAATAAGGTACTGACGCGCTCTGATAAAAACCGTGGTAAGTCGGACAACGTGCCCTCCGA
AGAGGTTGTGAAAAAGATGAAAAATTATTGGCGCCAGCTTTTAAACGCGAAGCTGATCACACAACGTAAATTCGATA
ATTTGACCAAGGCTGAACGGGGTGGCCTGAGCGAGTTAGATAAGGCAGGATTTATTAAACGCCAGTTAGTGGAGACT
CGTCAAATCACCAAACATGTCGCGCAGATTTTGGACAGCCGGATGAACACCAAGTACGATGAAAATGACAAACTGAT
CCGTGAGGTGAAAGTCATTACTCTGAAGTCCAAATTAGTTAGTGATTTCCGGAAGGACTTTCAATTCTACAAAGTCC
GTGAAATTAATAACTATCATCACGCACATGACGCGTACCTGAATGCAGTGGTTGGGACCGCCCTTATCAAGAAATAT
CCTAAGCTGGAGTCGGAGTTTGTCTATGGCGACTATAAGGTATACGATGTTCGCAAAATGATTGCGAAATCTGAGCA
GGAGATCGGTAAGGCAACCGCAAAATATTTCTTTTACTCAAACATTATGAATTTCTTTAAGACAGAAATCACTCTGG
CCAACGGGGAGATTCGCAAACGTCCGTTGATCGAAACAAACGGCGAGACTGGCGAAATTGTTTGGGACAAAGGGCGT
GATTTCGCGACGGTGCGCAAGGTACTGAGCATGCCTCAAGTCAATATTGTTAAGAAAACCGAAGTGCAGACGGGCGG
GTTTTCCAAGGAAAGCATCTTACCCAAACGTAATTCAGATAAACTTATTGCACGCAAAAAGGACTGGGATCCGAAAA
AGTATGGAGGCTTCGACAGTCCAACCGTAGCCTACTCTGTTCTCGTTGTAGCGAAAGTAGAAAAGGGTAAATCCAAG
AAACTGAAATCTGTCAAGGAGTTGCTTGGAATCACCATTATGGAGCGTAGCTCCTTCGAGAAGAACCCGATTGACTT
TCTGGAAGCCAAAGGATATAAAGAGGTCAAGAAAGATCTTATCATTAAGCTGCCTAAGTATTCACTCTTCGAGCTGG
AAAATGGTCGTAAACGCATGCTCGCTTCTGCCGGCGAGTTGCAGAAGGGCAATGAATTAGCACTTCCATCAAAGTAC
GTTAACTTCCTGTATTTGGCCAGCCATTACGAGAAACTGAAGGGGTCTCCAGAGGACAACGAACAGAAACAATTATT
TGTAGAGCAGCACAAGCATTATCTTGATGAAATCATTGAGCAAATTTCCGAATTCAGTAAACGCGTAATCCTGGCCG
ATGCAAACCTCGACAAGGTGCTGAGCGCTTACAATAAGCATCGCGACAAACCTATCCGTGAGCAGGCTGAAAATATC
ATTCACCTGTTCACATTAACGAACCTGGGCGCTCCGGCCGCTTTTAAATATTTCGACACGACAATCGACCGTAAGCG
CTATACCAGTACGAAAGAAGTGTTGGATGCGACCCTTATTCACCAGTCAATTACAGGATTATATGAGACCCGTATCG
ACCTTAGCCAATTAGGTGGGGATGGAGGCGGAGGGTCGGAAGCGGCAGCAAAAGGAGGCGGAGGAAGTATGGTTAGC
AAAGGTGAAGAACTGTTTACCGGCGTTGTGCCGATTCTGGTGGAACTGGATGGTGATGTGAATGGCCATAAATTTAG
CGTTagcGGCGAAGGCGAAGGTGATGCGACCtatGGTAAACTGACCCTGAAATTTATTTGCACCACCGGTAAACTGC
CGGTTCCGTGGCCGACCCTGGTGACCACCCTGACCTATGGCGTTCAGTGCTTTAGCCGCTATCCGGATCATATGAAA
cagCATGATTTCTTTAAAAGCGCGATGCCGGAAGGCTATGTGCAGGAACGTACCATTtttTTCAAAGATGATGGCaa
cTATAAAACCCGTGCGGAAGTTAAATTTGAAGGCGATACCCTGGTGAACCGCATTGAACTGAAAGGTATTGATTTTA
AAGAAGATGGCAACATTCTGGGTCATAAACTGGAATATAATtacAACAGCCATAATGTGTATATTatgGCCGATAAA
CAGAAAAATGGCATCAAAgtgAACTTTAAAATCCGTCACAACattGAAGATGGTAGCGTGCAGCTGGCGGATCATTA
TCAGCAGAATACCCCGATTGGTGATGGCCCGGTGCTGCTGCCGGATAATCATTATCTGAGCACCCAGAGCgcgCTGA
GCAAAGATCCGAATGAAAAACGTGATCATATGGTGCTGCTGGAATTTGTTACCGCCGCGGGCATTACCctgGGTATG
GATGAACTGTATAAA
(Cas9-A(EAAAK)₄A-(SEQ ID NO: 8)eGFP chimera DNA sequence)
SEQ ID NO: 351
ATGGACAAAAAGTACTCTATTGGCCTGGATATCGGGACCAACAGCGTCGGGTGGGCTGTTATCACCGACGAGTATAA
AGTACCTTCGAAAAAGTTCAAAGTGCTGGGCAACACCGATCGCCATTCAATCAAAAAGAACTTGATTGGTGCGCTGT
TGTTTGACTCCGGGGAAACCGCCGAGGCGACTCGCCTTAAACGTACAGCACGTCGCCGGTACACTCGGCGTAAGAAT
CGCATTTGCTATTTGCAGGAAATCTTTAGCAACGAGATGGCAAAAGTCGATGACTCGTTTTTCCACCGCCTCGAGGA
AAGCTTTCTGGTGGAGGAAGACAAAAAGCATGAGCGTCACCCGATCTTCGGCAACATTGTCGATGAAGTAGCGTATC
ATGAAAAATACCCAACCATTTACCACTTACGCAAAAAGCTGGTGGACAGCACTGACAAAGCTGATTTGCGCCTTATC
TATTTAGCCCTGGCACATATGATTAAGTTTCGTGGTCACTTCCTGATCGAAGGAGACTTAAATCCCGACAACAGTGA
TGTTGATAAATTGTTTATTCAGCTTGTCCAAACTTACAATCAACTGTTCGAGGAAAACCCGATCAATGCCTCCGGTG
TGGATGCAAAAGCCATTTTAAGTGCACGCCTTAGCAAGTCCCGTCGCTTAGAAAACCTTATCGCGCAGCTGCCCGGC
GAGAAAAAGAATGGTTTGTTTGGGAACCTTATTGCCTTGAGCTTAGGCCTCACCCCGAATTTCAAAAGTAATTTCGA
TCTTGCAGAAGACGCCAAATTACAACTGTCGAAGGATACTTATGATGACGATCTCGATAATCTGTTAGCGCAGATTG
GTGACCAATACGCCGATCTTTTTCTGGCGGCTAAAAATCTGAGCGACGCCATCTTGCTTTCGGATATTCTCCGCGTT
AACACCGAAATCACGAAAGCGCCTCTTAGTGCCAGCATGATTAAACGTTATGATGAACACCACCAGGACCTGACCTT
ACTCAAAGCGTTGGTTCGCCAGCAACTGCCAGAGAAGTACAAAGAAATCTTCTTTGATCAGTCAAAGAATGGTTATG
CCGGCTATATTGACGGGGGTGCAAGCCAAGAGGAATTCTACAAATTTATCAAGCCTATTCTGGAGAAAATGGATGGC
ACCGAAGAGTTATTGGTGAAGCTTAACCGTGAAGACCTCCTGCGGAAACAGCGCACATTCGATAATGGTTCGATCCC
ACACCAAATCCATTTGGGGGAGTTACACGCTATTTTGCGTCGCCAGGAAGACTTTTACCCTTTCCTGAAGGATAACC
GGGAGAAAATTGAGAAGATCCTTACCTTTCGTATTCCGTATTACGTAGGCCCCTTAGCACGGGGTAATAGCCGTTTC
GCGTGGATGACACGGAAGTCGGAAGAGACGATCACCCCGTGGAACTTCGAAGAGGTAGTCGACAAGGGCGCATCAGC
GCAGTCTTTTATTGAACGTATGACGAATTTCGATAAAAACTTGCCCAATGAGAAGGTGCTTCCGAAACATTCCTTGT
TATATGAATATTTTACAGTTTACAACGAGCTGACCAAGGTTAAATACGTGACGGAAGGAATGCGCAAGCCCGCTTTT
CTTAGCGGTGAGCAAAAAAAGGCGATCGTCGACCTGTTATTCAAAACGAATCGTAAGGTGACTGTAAAGCAACTCAA
AGAAGATTACTTCAAAAAGATTGAGTGCTTCGACAGCGTCGAAATCTCTGGGGTAGAGGATCGGTTTAACGCAAGTT
TAGGTACCTACCATGACCTGCTTAAAATCATTAAGGATAAAGACTTCTTAGATAATGAAGAGAACGAAGATATTCTC
GAGGACATCGTCTTGACGTTAACCTTATTTGAGGATCGTGAAATGATTGAGGAACGCCTCAAAACTTATGCCCACCT
GTTCGACGATAAGGTGATGAAGCAGCTGAAACGTCGGCGCTACACAGGATGGGGCCGCTTGAGTCGCAAACTTATTA
ACGGAATCCGTGACAAGCAATCCGGCAAAACGATTCTGGATTTCTTGAAGTCGGACGGATTTGCTAATCGCAACTTC
ATGCAGTTGATCCATGATGACTCCCTGACTTTTAAAGAGGATATTCAAAAGGCGCAGGTTAGTGGTCAAGGCGACAG
CTTACACGAACACATCGCAAATTTGGCTGGTTCGCCGGCCATTAAAAAGGGGATCCTCCAGACCGTGAAAGTTGTAG
ATGAGCTTGTTAAGGTCATGGGTCGTCATAAGCCCGAAAACATCGTGATTGAAATGGCGCGGGAGAATCAAACGACC
CAGAAAGGACAAAAGAATAGCCGTGAACGGATGAAGCGGATCGAGGAAGGCATTAAAGAGCTGGGGTCTCAAATCTT
GAAGGAACACCCTGTGGAGAACACTCAGCTCCAAAATGAAAAACTTTACCTGTACTATTTGCAGAACGGACGCGATA
TGTACGTGGACCAAGAGTTGGATATTAATCGGCTGAGTGACTACGACGTTGATCATATCGTCCCGCAGAGCTTCCTC
AAAGACGATTCTATTGACAATAAGGTACTGACGCGCTCTGATAAAAACCGTGGTAAGTCGGACAACGTGCCCTCCGA
AGAGGTTGTGAAAAAGATGAAAAATTATTGGCGCCAGCTTTTAAACGCGAAGCTGATCACACAACGTAAATTCGATA
ATTTGACCAAGGCTGAACGGGGTGGCCTGAGCGAGTTAGATAAGGCAGGATTTATTAAACGCCAGTTAGTGGAGACT
CGTCAAATCACCAAACATGTCGCGCAGATTTTGGACAGCCGGATGAACACCAAGTACGATGAAAATGACAAACTGAT
CCGTGAGGTGAAAGTCATTACTCTGAAGTCCAAATTAGTTAGTGATTTCCGGAAGGACTTTCAATTCTACAAAGTCC
GTGAAATTAATAACTATCATCACGCACATGACGCGTACCTGAATGCAGTGGTTGGGACCGCCCTTATCAAGAAATAT
CCTAAGCTGGAGTCGGAGTTTGTCTATGGCGACTATAAGGTATACGATGTTCGCAAAATGATTGCGAAATCTGAGCA
GGAGATCGGTAAGGCAACCGCAAAATATTTCTTTTACTCAAACATTATGAATTTCTTTAAGACAGAAATCACTCTGG
CCAACGGGGAGATTCGCAAACGTCCGTTGATCGAAACAAACGGCGAGACTGGCGAAATTGTTTGGGACAAAGGGCGT
GATTTCGCGACGGTGCGCAAGGTACTGAGCATGCCTCAAGTCAATATTGTTAAGAAAACCGAAGTGCAGACGGGCGG
GTTTTCCAAGGAAAGCATCTTACCCAAACGTAATTCAGATAAACTTATTGCACGCAAAAAGGACTGGGATCCGAAAA
AGTATGGAGGCTTCGACAGTCCAACCGTAGCCTACTCTGTTCTCGTTGTAGCGAAAGTAGAAAAGGGTAAATCCAAG
AAACTGAAATCTGTCAAGGAGTTGCTTGGAATCACCATTATGGAGCGTAGCTCCTTCGAGAAGAACCCGATTGACTT
TCTGGAAGCCAAAGGATATAAAGAGGTCAAGAAAGATCTTATCATTAAGCTGCCTAAGTATTCACTCTTCGAGCTGG
AAAATGGTCGTAAACGCATGCTCGCTTCTGCCGGCGAGTTGCAGAAGGGCAATGAATTAGCACTTCCATCAAAGTAC
GTTAACTTCCTGTATTTGGCCAGCCATTACGAGAAACTGAAGGGGTCTCCAGAGGACAACGAACAGAAACAATTATT
TGTAGAGCAGCACAAGCATTATCTTGATGAAATCATTGAGCAAATTTCCGAATTCAGTAAACGCGTAATCCTGGCCG
ATGCAAACCTCGACAAGGTGCTGAGCGCTTACAATAAGCATCGCGACAAACCTATCCGTGAGCAGGCTGAAAATATC
ATTCACCTGTTCACATTAACGAACCTGGGCGCTCCGGCCGCTTTTAAATATTTCGACACGACAATCGACCGTAAGCG
CTATACCAGTACGAAAGAAGTGTTGGATGCGACCCTTATTCACCAGTCAATTACAGGATTATATGAGACCCGTATCG
ACCTTAGCCAATTAGGTGGGGATGCTGAGGCCGCAGCAAAAGAGGCTGCCGCTAAGGAGGCTGCTGCAAAAGAAGCA
GCAGCGAAAGCTATGGTTAGCAAAGGTGAAGAACTGTTTACCGGCGTTGTGCCGATTCTGGTGGAACTGGATGGTGA
TGTGAATGGCCATAAATTTAGCGTTagcGGCGAAGGCGAAGGTGATGCGACCtatGGTAAACTGACCCTGAAATTTA
TTTGCACCACCGGTAAACTGCCGGTTCCGTGGCCGACCCTGGTGACCACCCTGACCTATGGCGTTCAGTGCTTTAGC
CGCTATCCGGATCATATGAAAcagCATGATTTCTTTAAAAGCGCGATGCCGGAAGGCTATGTGCAGGAACGTACCAT
TtttTTCAAAGATGATGGCaacTATAAAACCCGTGCGGAAGTTAAATTTGAAGGCGATACCCTGGTGAACCGCATTG
AACTGAAAGGTATTGATTTTAAAGAAGATGGCAACATTCTGGGTCATAAACTGGAATATAATtacAACAGCCATAAT
GTGTATATTatgGCCGATAAACAGAAAAATGGCATCAAAgtgAACTTTAAAATCCGTCACAACattGAAGATGGTAG
CGTGCAGCTGGCGGATCATTATCAGCAGAATACCCCGATTGGTGATGGCCCGGTGCTGCTGCCGGATAATCATTATC
TGAGCACCCAGAGCgcgCTGAGCAAAGATCCGAATGAAAAACGTGATCATATGGTGCTGCTGGAATTTGTTACCGCC
GCGGGCATTACCctgGGTATGGATGAACTGTATAAA
(Cas9-A(EAAAK)₄ALEA(EAAAK)₄A(SEQ ID NO: 9)-eGFP chimera DNA sequence)
SEQ ID NO: 352
ATGGACAAAAAGTACTCTATTGGCCTGGATATCGGGACCAACAGCGTCGGGTGGGCTGTTATCACCGACGAGTATAA
AGTACCTTCGAAAAAGTTCAAAGTGCTGGGCAACACCGATCGCCATTCAATCAAAAAGAACTTGATTGGTGCGCTGT
TGTTTGACTCCGGGGAAACCGCCGAGGCGACTCGCCTTAAACGTACAGCACGTCGCCGGTACACTCGGCGTAAGAAT
CGCATTTGCTATTTGCAGGAAATCTTTAGCAACGAGATGGCAAAAGTCGATGACTCGTTTTTCCACCGCCTCGAGGA
AAGCTTTCTGGTGGAGGAAGACAAAAAGCATGAGCGTCACCCGATCTTCGGCAACATTGTCGATGAAGTAGCGTATC
ATGAAAAATACCCAACCATTTACCACTTACGCAAAAAGCTGGTGGACAGCACTGACAAAGCTGATTTGCGCCTTATC
TATTTAGCCCTGGCACATATGATTAAGTTTCGTGGTCACTTCCTGATCGAAGGAGACTTAAATCCCGACAACAGTGA
TGTTGATAAATTGTTTATTCAGCTTGTCCAAACTTACAATCAACTGTTCGAGGAAAACCCGATCAATGCCTCCGGTG
TGGATGCAAAAGCCATTTTAAGTGCACGCCTTAGCAAGTCCCGTCGCTTAGAAAACCTTATCGCGCAGCTGCCCGGC
GAGAAAAAGAATGGTTTGTTTGGGAACCTTATTGCCTTGAGCTTAGGCCTCACCCCGAATTTCAAAAGTAATTTCGA
TCTTGCAGAAGACGCCAAATTACAACTGTCGAAGGATACTTATGATGACGATCTCGATAATCTGTTAGCGCAGATTG
GTGACCAATACGCCGATCTTTTTCTGGCGGCTAAAAATCTGAGCGACGCCATCTTGCTTTCGGATATTCTCCGCGTT
AACACCGAAATCACGAAAGCGCCTCTTAGTGCCAGCATGATTAAACGTTATGATGAACACCACCAGGACCTGACCTT
ACTCAAAGCGTTGGTTCGCCAGCAACTGCCAGAGAAGTACAAAGAAATCTTCTTTGATCAGTCAAAGAATGGTTATG
CCGGCTATATTGACGGGGGTGCAAGCCAAGAGGAATTCTACAAATTTATCAAGCCTATTCTGGAGAAAATGGATGGC
ACCGAAGAGTTATTGGTGAAGCTTAACCGTGAAGACCTCCTGCGGAAACAGCGCACATTCGATAATGGTTCGATCCC
ACACCAAATCCATTTGGGGGAGTTACACGCTATTTTGCGTCGCCAGGAAGACTTTTACCCTTTCCTGAAGGATAACC
GGGAGAAAATTGAGAAGATCCTTACCTTTCGTATTCCGTATTACGTAGGCCCCTTAGCACGGGGTAATAGCCGTTTC
GCGTGGATGACACGGAAGTCGGAAGAGACGATCACCCCGTGGAACTTCGAAGAGGTAGTCGACAAGGGCGCATCAGC
GCAGTCTTTTATTGAACGTATGACGAATTTCGATAAAAACTTGCCCAATGAGAAGGTGCTTCCGAAACATTCCTTGT
TATATGAATATTTTACAGTTTACAACGAGCTGACCAAGGTTAAATACGTGACGGAAGGAATGCGCAAGCCCGCTTTT
CTTAGCGGTGAGCAAAAAAAGGCGATCGTCGACCTGTTATTCAAAACGAATCGTAAGGTGACTGTAAAGCAACTCAA
AGAAGATTACTTCAAAAAGATTGAGTGCTTCGACAGCGTCGAAATCTCTGGGGTAGAGGATCGGTTTAACGCAAGTT
TAGGTACCTACCATGACCTGCTTAAAATCATTAAGGATAAAGACTTCTTAGATAATGAAGAGAACGAAGATATTCTC
GAGGACATCGTCTTGACGTTAACCTTATTTGAGGATCGTGAAATGATTGAGGAACGCCTCAAAACTTATGCCCACCT
GTTCGACGATAAGGTGATGAAGCAGCTGAAACGTCGGCGCTACACAGGATGGGGCCGCTTGAGTCGCAAACTTATTA
ACGGAATCCGTGACAAGCAATCCGGCAAAACGATTCTGGATTTCTTGAAGTCGGACGGATTTGCTAATCGCAACTTC
ATGCAGTTGATCCATGATGACTCCCTGACTTTTAAAGAGGATATTCAAAAGGCGCAGGTTAGTGGTCAAGGCGACAG
CTTACACGAACACATCGCAAATTTGGCTGGTTCGCCGGCCATTAAAAAGGGGATCCTCCAGACCGTGAAAGTTGTAG
ATGAGCTTGTTAAGGTCATGGGTCGTCATAAGCCCGAAAACATCGTGATTGAAATGGCGCGGGAGAATCAAACGACC
CAGAAAGGACAAAAGAATAGCCGTGAACGGATGAAGCGGATCGAGGAAGGCATTAAAGAGCTGGGGTCTCAAATCTT
GAAGGAACACCCTGTGGAGAACACTCAGCTCCAAAATGAAAAACTTTACCTGTACTATTTGCAGAACGGACGCGATA
TGTACGTGGACCAAGAGTTGGATATTAATCGGCTGAGTGACTACGACGTTGATCATATCGTCCCGCAGAGCTTCCTC
AAAGACGATTCTATTGACAATAAGGTACTGACGCGCTCTGATAAAAACCGTGGTAAGTCGGACAACGTGCCCTCCGA
AGAGGTTGTGAAAAAGATGAAAAATTATTGGCGCCAGCTTTTAAACGCGAAGCTGATCACACAACGTAAATTCGATA
ATTTGACCAAGGCTGAACGGGGTGGCCTGAGCGAGTTAGATAAGGCAGGATTTATTAAACGCCAGTTAGTGGAGACT
CGTCAAATCACCAAACATGTCGCGCAGATTTTGGACAGCCGGATGAACACCAAGTACGATGAAAATGACAAACTGAT
CCGTGAGGTGAAAGTCATTACTCTGAAGTCCAAATTAGTTAGTGATTTCCGGAAGGACTTTCAATTCTACAAAGTCC
GTGAAATTAATAACTATCATCACGCACATGACGCGTACCTGAATGCAGTGGTTGGGACCGCCCTTATCAAGAAATAT
CCTAAGCTGGAGTCGGAGTTTGTCTATGGCGACTATAAGGTATACGATGTTCGCAAAATGATTGCGAAATCTGAGCA
GGAGATCGGTAAGGCAACCGCAAAATATTTCTTTTACTCAAACATTATGAATTTCTTTAAGACAGAAATCACTCTGG
CCAACGGGGAGATTCGCAAACGTCCGTTGATCGAAACAAACGGCGAGACTGGCGAAATTGTTTGGGACAAAGGGCGT
GATTTCGCGACGGTGCGCAAGGTACTGAGCATGCCTCAAGTCAATATTGTTAAGAAAACCGAAGTGCAGACGGGCGG
GTTTTCCAAGGAAAGCATCTTACCCAAACGTAATTCAGATAAACTTATTGCACGCAAAAAGGACTGGGATCCGAAAA
AGTATGGAGGCTTCGACAGTCCAACCGTAGCCTACTCTGTTCTCGTTGTAGCGAAAGTAGAAAAGGGTAAATCCAAG
AAACTGAAATCTGTCAAGGAGTTGCTTGGAATCACCATTATGGAGCGTAGCTCCTTCGAGAAGAACCCGATTGACTT
TCTGGAAGCCAAAGGATATAAAGAGGTCAAGAAAGATCTTATCATTAAGCTGCCTAAGTATTCACTCTTCGAGCTGG
AAAATGGTCGTAAACGCATGCTCGCTTCTGCCGGCGAGTTGCAGAAGGGCAATGAATTAGCACTTCCATCAAAGTAC
GTTAACTTCCTGTATTTGGCCAGCCATTACGAGAAACTGAAGGGGTCTCCAGAGGACAACGAACAGAAACAATTATT
TGTAGAGCAGCACAAGCATTATCTTGATGAAATCATTGAGCAAATTTCCGAATTCAGTAAACGCGTAATCCTGGCCG
ATGCAAACCTCGACAAGGTGCTGAGCGCTTACAATAAGCATCGCGACAAACCTATCCGTGAGCAGGCTGAAAATATC
ATTCACCTGTTCACATTAACGAACCTGGGCGCTCCGGCCGCTTTTAAATATTTCGACACGACAATCGACCGTAAGCG
CTATACCAGTACGAAAGAAGTGTTGGATGCGACCCTTATTCACCAGTCAATTACAGGATTATATGAGACCCGTATCG
ACCTTAGCCAATTAGGTGGGGATGCCGAAGCAGCAGCCAAAGAAGCTGCCGCAAAGGAGGCGGCAGCTAAAGAAGCG
GCCGCTAAGGCATTGGAAGCGGAGGCGGCTGCCAAGGAGGCTGCGGCGAAAGAAGCTGCGGCCAAAGAAGCGGCTGC
AAAAGCGATGGTTAGCAAAGGTGAAGAACTGTTTACCGGCGTTGTGCCGATTCTGGTGGAACTGGATGGTGATGTGA
ATGGCCATAAATTTAGCGTTagcGGCGAAGGCGAAGGTGATGCGACCtatGGTAAACTGACCCTGAAATTTATTTGC
ACCACCGGTAAACTGCCGGTTCCGTGGCCGACCCTGGTGACCACCCTGACCTATGGCGTTCAGTGCTTTAGCCGCTA
TCCGGATCATATGAAAcagCATGATTTCTTTAAAAGCGCGATGCCGGAAGGCTATGTGCAGGAACGTACCATTtttT
TCAAAGATGATGGCaacTATAAAACCCGTGCGGAAGTTAAATTTGAAGGCGATACCCTGGTGAACCGCATTGAACTG
AAAGGTATTGATTTTAAAGAAGATGGCAACATTCTGGGTCATAAACTGGAATATAATtacAACAGCCATAATGTGTA
TATTatgGCCGATAAACAGAAAAATGGCATCAAAgtgAACTTTAAAATCCGTCACAACattGAAGATGGTAGCGTGC
AGCTGGCGGATCATTATCAGCAGAATACCCCGATTGGTGATGGCCCGGTGCTGCTGCCGGATAATCATTATCTGAGC
ACCCAGAGCgcgCTGAGCAAAGATCCGAATGAAAAACGTGATCATATGGTGCTGCTGGAATTTGTTACCGCCGCGGG
CATTACCctgGGTATGGATGAACTGTATAAA
(Cas9-LEA(EAAAK)₄ALEA(EAAAK)₄ALE(SEQ ID NO: 10)-eGFP chimera DNA sequence)
SEQ ID NO: 353
ATGGACAAAAAGTACTCTATTGGCCTGGATATCGGGACCAACAGCGTCGGGTGGGCTGTTATCACCGACGAGTATAA
AGTACCTTCGAAAAAGTTCAAAGTGCTGGGCAACACCGATCGCCATTCAATCAAAAAGAACTTGATTGGTGCGCTGT
TGTTTGACTCCGGGGAAACCGCCGAGGCGACTCGCCTTAAACGTACAGCACGTCGCCGGTACACTCGGCGTAAGAAT
CGCATTTGCTATTTGCAGGAAATCTTTAGCAACGAGATGGCAAAAGTCGATGACTCGTTTTTCCACCGCCTCGAGGA
AAGCTTTCTGGTGGAGGAAGACAAAAAGCATGAGCGTCACCCGATCTTCGGCAACATTGTCGATGAAGTAGCGTATC
ATGAAAAATACCCAACCATTTACCACTTACGCAAAAAGCTGGTGGACAGCACTGACAAAGCTGATTTGCGCCTTATC
TATTTAGCCCTGGCACATATGATTAAGTTTCGTGGTCACTTCCTGATCGAAGGAGACTTAAATCCCGACAACAGTGA
TGTTGATAAATTGTTTATTCAGCTTGTCCAAACTTACAATCAACTGTTCGAGGAAAACCCGATCAATGCCTCCGGTG
TGGATGCAAAAGCCATTTTAAGTGCACGCCTTAGCAAGTCCCGTCGCTTAGAAAACCTTATCGCGCAGCTGCCCGGC
GAGAAAAAGAATGGTTTGTTTGGGAACCTTATTGCCTTGAGCTTAGGCCTCACCCCGAATTTCAAAAGTAATTTCGA
TCTTGCAGAAGACGCCAAATTACAACTGTCGAAGGATACTTATGATGACGATCTCGATAATCTGTTAGCGCAGATTG
GTGACCAATACGCCGATCTTTTTCTGGCGGCTAAAAATCTGAGCGACGCCATCTTGCTTTCGGATATTCTCCGCGTT
AACACCGAAATCACGAAAGCGCCTCTTAGTGCCAGCATGATTAAACGTTATGATGAACACCACCAGGACCTGACCTT
ACTCAAAGCGTTGGTTCGCCAGCAACTGCCAGAGAAGTACAAAGAAATCTTCTTTGATCAGTCAAAGAATGGTTATG
CCGGCTATATTGACGGGGGTGCAAGCCAAGAGGAATTCTACAAATTTATCAAGCCTATTCTGGAGAAAATGGATGGC
ACCGAAGAGTTATTGGTGAAGCTTAACCGTGAAGACCTCCTGCGGAAACAGCGCACATTCGATAATGGTTCGATCCC
ACACCAAATCCATTTGGGGGAGTTACACGCTATTTTGCGTCGCCAGGAAGACTTTTACCCTTTCCTGAAGGATAACC
GGGAGAAAATTGAGAAGATCCTTACCTTTCGTATTCCGTATTACGTAGGCCCCTTAGCACGGGGTAATAGCCGTTTC
GCGTGGATGACACGGAAGTCGGAAGAGACGATCACCCCGTGGAACTTCGAAGAGGTAGTCGACAAGGGCGCATCAGC
GCAGTCTTTTATTGAACGTATGACGAATTTCGATAAAAACTTGCCCAATGAGAAGGTGCTTCCGAAACATTCCTTGT
TATATGAATATTTTACAGTTTACAACGAGCTGACCAAGGTTAAATACGTGACGGAAGGAATGCGCAAGCCCGCTTTT
CTTAGCGGTGAGCAAAAAAAGGCGATCGTCGACCTGTTATTCAAAACGAATCGTAAGGTGACTGTAAAGCAACTCAA
AGAAGATTACTTCAAAAAGATTGAGTGCTTCGACAGCGTCGAAATCTCTGGGGTAGAGGATCGGTTTAACGCAAGTT
TAGGTACCTACCATGACCTGCTTAAAATCATTAAGGATAAAGACTTCTTAGATAATGAAGAGAACGAAGATATTCTC
GAGGACATCGTCTTGACGTTAACCTTATTTGAGGATCGTGAAATGATTGAGGAACGCCTCAAAACTTATGCCCACCT
GTTCGACGATAAGGTGATGAAGCAGCTGAAACGTCGGCGCTACACAGGATGGGGCCGCTTGAGTCGCAAACTTATTA
ACGGAATCCGTGACAAGCAATCCGGCAAAACGATTCTGGATTTCTTGAAGTCGGACGGATTTGCTAATCGCAACTTC
ATGCAGTTGATCCATGATGACTCCCTGACTTTTAAAGAGGATATTCAAAAGGCGCAGGTTAGTGGTCAAGGCGACAG
CTTACACGAACACATCGCAAATTTGGCTGGTTCGCCGGCCATTAAAAAGGGGATCCTCCAGACCGTGAAAGTTGTAG
ATGAGCTTGTTAAGGTCATGGGTCGTCATAAGCCCGAAAACATCGTGATTGAAATGGCGCGGGAGAATCAAACGACC
CAGAAAGGACAAAAGAATAGCCGTGAACGGATGAAGCGGATCGAGGAAGGCATTAAAGAGCTGGGGTCTCAAATCTT
GAAGGAACACCCTGTGGAGAACACTCAGCTCCAAAATGAAAAACTTTACCTGTACTATTTGCAGAACGGACGCGATA
TGTACGTGGACCAAGAGTTGGATATTAATCGGCTGAGTGACTACGACGTTGATCATATCGTCCCGCAGAGCTTCCTC
AAAGACGATTCTATTGACAATAAGGTACTGACGCGCTCTGATAAAAACCGTGGTAAGTCGGACAACGTGCCCTCCGA
AGAGGTTGTGAAAAAGATGAAAAATTATTGGCGCCAGCTTTTAAACGCGAAGCTGATCACACAACGTAAATTCGATA
ATTTGACCAAGGCTGAACGGGGTGGCCTGAGCGAGTTAGATAAGGCAGGATTTATTAAACGCCAGTTAGTGGAGACT
CGTCAAATCACCAAACATGTCGCGCAGATTTTGGACAGCCGGATGAACACCAAGTACGATGAAAATGACAAACTGAT
CCGTGAGGTGAAAGTCATTACTCTGAAGTCCAAATTAGTTAGTGATTTCCGGAAGGACTTTCAATTCTACAAAGTCC
GTGAAATTAATAACTATCATCACGCACATGACGCGTACCTGAATGCAGTGGTTGGGACCGCCCTTATCAAGAAATAT
CCTAAGCTGGAGTCGGAGTTTGTCTATGGCGACTATAAGGTATACGATGTTCGCAAAATGATTGCGAAATCTGAGCA
GGAGATCGGTAAGGCAACCGCAAAATATTTCTTTTACTCAAACATTATGAATTTCTTTAAGACAGAAATCACTCTGG
CCAACGGGGAGATTCGCAAACGTCCGTTGATCGAAACAAACGGCGAGACTGGCGAAATTGTTTGGGACAAAGGGCGT
GATTTCGCGACGGTGCGCAAGGTACTGAGCATGCCTCAAGTCAATATTGTTAAGAAAACCGAAGTGCAGACGGGCGG
GTTTTCCAAGGAAAGCATCTTACCCAAACGTAATTCAGATAAACTTATTGCACGCAAAAAGGACTGGGATCCGAAAA
AGTATGGAGGCTTCGACAGTCCAACCGTAGCCTACTCTGTTCTCGTTGTAGCGAAAGTAGAAAAGGGTAAATCCAAG
AAACTGAAATCTGTCAAGGAGTTGCTTGGAATCACCATTATGGAGCGTAGCTCCTTCGAGAAGAACCCGATTGACTT
TCTGGAAGCCAAAGGATATAAAGAGGTCAAGAAAGATCTTATCATTAAGCTGCCTAAGTATTCACTCTTCGAGCTGG
AAAATGGTCGTAAACGCATGCTCGCTTCTGCCGGCGAGTTGCAGAAGGGCAATGAATTAGCACTTCCATCAAAGTAC
GTTAACTTCCTGTATTTGGCCAGCCATTACGAGAAACTGAAGGGGTCTCCAGAGGACAACGAACAGAAACAATTATT
TGTAGAGCAGCACAAGCATTATCTTGATGAAATCATTGAGCAAATTTCCGAATTCAGTAAACGCGTAATCCTGGCCG
ATGCAAACCTCGACAAGGTGCTGAGCGCTTACAATAAGCATCGCGACAAACCTATCCGTGAGCAGGCTGAAAATATC
ATTCACCTGTTCACATTAACGAACCTGGGCGCTCCGGCCGCTTTTAAATATTTCGACACGACAATCGACCGTAAGCG
CTATACCAGTACGAAAGAAGTGTTGGATGCGACCCTTATTCACCAGTCAATTACAGGATTATATGAGACCCGTATCG
ACCTTAGCCAATTAGGTGGGGATTTAGAGGCTGAGGCTGCTGCCAAGGAGGCTGCTGCGAAGGAAGCTGCAGCTAAA
GAGGCAGCGGCCAAAGCACTTGAGGCCGAAGCCGCCGCGAAAGAAGCCGCTGCTAAGGAGGCAGCCGCCAAAGAAGC
GGCAGCTAAAGCATTAGAAATGGTTAGCAAAGGTGAAGAACTGTTTACCGGCGTTGTGCCGATTCTGGTGGAACTGG
ATGGTGATGTGAATGGCCATAAATTTAGCGTTagcGGCGAAGGCGAAGGTGATGCGACCtatGGTAAACTGACCCTG
AAATTTATTTGCACCACCGGTAAACTGCCGGTTCCGTGGCCGACCCTGGTGACCACCCTGACCTATGGCGTTCAGTG
CTTTAGCCGCTATCCGGATCATATGAAAcagCATGATTTCTTTAAAAGCGCGATGCCGGAAGGCTATGTGCAGGAAC
GTACCATTtttTTCAAAGATGATGGCaacTATAAAACCCGTGCGGAAGTTAAATTTGAAGGCGATACCCTGGTGAAC
CGCATTGAACTGAAAGGTATTGATTTTAAAGAAGATGGCAACATTCTGGGTCATAAACTGGAATATAATtacAACAG
CCATAATGTGTATATTatgGCCGATAAACAGAAAAATGGCATCAAAgtgAACTTTAAAATCCGTCACAACattGAAG
ATGGTAGCGTGCAGCTGGCGGATCATTATCAGCAGAATACCCCGATTGGTGATGGCCCGGTGCTGCTGCCGGATAAT
CATTATCTGAGCACCCAGAGCgcgCTGAGCAAAGATCCGAATGAAAAACGTGATCATATGGTGCTGCTGGAATTTGT
TACCGCCGCGGGCATTACCctgGGTATGGATGAACTGTATAAA
(Cas9-APA-eGFP chimera DNA sequence)
SEQ ID NO: 354
ATGGACAAAAAGTACTCTATTGGCCTGGATATCGGGACCAACAGCGTCGGGTGGGCTGTTATCACCGACGAGTATAA
AGTACCTTCGAAAAAGTTCAAAGTGCTGGGCAACACCGATCGCCATTCAATCAAAAAGAACTTGATTGGTGCGCTGT
TGTTTGACTCCGGGGAAACCGCCGAGGCGACTCGCCTTAAACGTACAGCACGTCGCCGGTACACTCGGCGTAAGAAT
CGCATTTGCTATTTGCAGGAAATCTTTAGCAACGAGATGGCAAAAGTCGATGACTCGTTTTTCCACCGCCTCGAGGA
AAGCTTTCTGGTGGAGGAAGACAAAAAGCATGAGCGTCACCCGATCTTCGGCAACATTGTCGATGAAGTAGCGTATC
ATGAAAAATACCCAACCATTTACCACTTACGCAAAAAGCTGGTGGACAGCACTGACAAAGCTGATTTGCGCCTTATC
TATTTAGCCCTGGCACATATGATTAAGTTTCGTGGTCACTTCCTGATCGAAGGAGACTTAAATCCCGACAACAGTGA
TGTTGATAAATTGTTTATTCAGCTTGTCCAAACTTACAATCAACTGTTCGAGGAAAACCCGATCAATGCCTCCGGTG
TGGATGCAAAAGCCATTTTAAGTGCACGCCTTAGCAAGTCCCGTCGCTTAGAAAACCTTATCGCGCAGCTGCCCGGC
GAGAAAAAGAATGGTTTGTTTGGGAACCTTATTGCCTTGAGCTTAGGCCTCACCCCGAATTTCAAAAGTAATTTCGA
TCTTGCAGAAGACGCCAAATTACAACTGTCGAAGGATACTTATGATGACGATCTCGATAATCTGTTAGCGCAGATTG
GTGACCAATACGCCGATCTTTTTCTGGCGGCTAAAAATCTGAGCGACGCCATCTTGCTTTCGGATATTCTCCGCGTT
AACACCGAAATCACGAAAGCGCCTCTTAGTGCCAGCATGATTAAACGTTATGATGAACACCACCAGGACCTGACCTT
ACTCAAAGCGTTGGTTCGCCAGCAACTGCCAGAGAAGTACAAAGAAATCTTCTTTGATCAGTCAAAGAATGGTTATG
CCGGCTATATTGACGGGGGTGCAAGCCAAGAGGAATTCTACAAATTTATCAAGCCTATTCTGGAGAAAATGGATGGC
ACCGAAGAGTTATTGGTGAAGCTTAACCGTGAAGACCTCCTGCGGAAACAGCGCACATTCGATAATGGTTCGATCCC
ACACCAAATCCATTTGGGGGAGTTACACGCTATTTTGCGTCGCCAGGAAGACTTTTACCCTTTCCTGAAGGATAACC
GGGAGAAAATTGAGAAGATCCTTACCTTTCGTATTCCGTATTACGTAGGCCCCTTAGCACGGGGTAATAGCCGTTTC
GCGTGGATGACACGGAAGTCGGAAGAGACGATCACCCCGTGGAACTTCGAAGAGGTAGTCGACAAGGGCGCATCAGC
GCAGTCTTTTATTGAACGTATGACGAATTTCGATAAAAACTTGCCCAATGAGAAGGTGCTTCCGAAACATTCCTTGT
TATATGAATATTTTACAGTTTACAACGAGCTGACCAAGGTTAAATACGTGACGGAAGGAATGCGCAAGCCCGCTTTT
CTTAGCGGTGAGCAAAAAAAGGCGATCGTCGACCTGTTATTCAAAACGAATCGTAAGGTGACTGTAAAGCAACTCAA
AGAAGATTACTTCAAAAAGATTGAGTGCTTCGACAGCGTCGAAATCTCTGGGGTAGAGGATCGGTTTAACGCAAGTT
TAGGTACCTACCATGACCTGCTTAAAATCATTAAGGATAAAGACTTCTTAGATAATGAAGAGAACGAAGATATTCTC
GAGGACATCGTCTTGACGTTAACCTTATTTGAGGATCGTGAAATGATTGAGGAACGCCTCAAAACTTATGCCCACCT
GTTCGACGATAAGGTGATGAAGCAGCTGAAACGTCGGCGCTACACAGGATGGGGCCGCTTGAGTCGCAAACTTATTA
ACGGAATCCGTGACAAGCAATCCGGCAAAACGATTCTGGATTTCTTGAAGTCGGACGGATTTGCTAATCGCAACTTC
ATGCAGTTGATCCATGATGACTCCCTGACTTTTAAAGAGGATATTCAAAAGGCGCAGGTTAGTGGTCAAGGCGACAG
CTTACACGAACACATCGCAAATTTGGCTGGTTCGCCGGCCATTAAAAAGGGGATCCTCCAGACCGTGAAAGTTGTAG
ATGAGCTTGTTAAGGTCATGGGTCGTCATAAGCCCGAAAACATCGTGATTGAAATGGCGCGGGAGAATCAAACGACC
CAGAAAGGACAAAAGAATAGCCGTGAACGGATGAAGCGGATCGAGGAAGGCATTAAAGAGCTGGGGTCTCAAATCTT
GAAGGAACACCCTGTGGAGAACACTCAGCTCCAAAATGAAAAACTTTACCTGTACTATTTGCAGAACGGACGCGATA
TGTACGTGGACCAAGAGTTGGATATTAATCGGCTGAGTGACTACGACGTTGATCATATCGTCCCGCAGAGCTTCCTC
AAAGACGATTCTATTGACAATAAGGTACTGACGCGCTCTGATAAAAACCGTGGTAAGTCGGACAACGTGCCCTCCGA
AGAGGTTGTGAAAAAGATGAAAAATTATTGGCGCCAGCTTTTAAACGCGAAGCTGATCACACAACGTAAATTCGATA
ATTTGACCAAGGCTGAACGGGGTGGCCTGAGCGAGTTAGATAAGGCAGGATTTATTAAACGCCAGTTAGTGGAGACT
CGTCAAATCACCAAACATGTCGCGCAGATTTTGGACAGCCGGATGAACACCAAGTACGATGAAAATGACAAACTGAT
CCGTGAGGTGAAAGTCATTACTCTGAAGTCCAAATTAGTTAGTGATTTCCGGAAGGACTTTCAATTCTACAAAGTCC
GTGAAATTAATAACTATCATCACGCACATGACGCGTACCTGAATGCAGTGGTTGGGACCGCCCTTATCAAGAAATAT
CCTAAGCTGGAGTCGGAGTTTGTCTATGGCGACTATAAGGTATACGATGTTCGCAAAATGATTGCGAAATCTGAGCA
GGAGATCGGTAAGGCAACCGCAAAATATTTCTTTTACTCAAACATTATGAATTTCTTTAAGACAGAAATCACTCTGG
CCAACGGGGAGATTCGCAAACGTCCGTTGATCGAAACAAACGGCGAGACTGGCGAAATTGTTTGGGACAAAGGGCGT
GATTTCGCGACGGTGCGCAAGGTACTGAGCATGCCTCAAGTCAATATTGTTAAGAAAACCGAAGTGCAGACGGGCGG
GTTTTCCAAGGAAAGCATCTTACCCAAACGTAATTCAGATAAACTTATTGCACGCAAAAAGGACTGGGATCCGAAAA
AGTATGGAGGCTTCGACAGTCCAACCGTAGCCTACTCTGTTCTCGTTGTAGCGAAAGTAGAAAAGGGTAAATCCAAG
AAACTGAAATCTGTCAAGGAGTTGCTTGGAATCACCATTATGGAGCGTAGCTCCTTCGAGAAGAACCCGATTGACTT
TCTGGAAGCCAAAGGATATAAAGAGGTCAAGAAAGATCTTATCATTAAGCTGCCTAAGTATTCACTCTTCGAGCTGG
AAAATGGTCGTAAACGCATGCTCGCTTCTGCCGGCGAGTTGCAGAAGGGCAATGAATTAGCACTTCCATCAAAGTAC
GTTAACTTCCTGTATTTGGCCAGCCATTACGAGAAACTGAAGGGGTCTCCAGAGGACAACGAACAGAAACAATTATT
TGTAGAGCAGCACAAGCATTATCTTGATGAAATCATTGAGCAAATTTCCGAATTCAGTAAACGCGTAATCCTGGCCG
ATGCAAACCTCGACAAGGTGCTGAGCGCTTACAATAAGCATCGCGACAAACCTATCCGTGAGCAGGCTGAAAATATC
ATTCACCTGTTCACATTAACGAACCTGGGCGCTCCGGCCGCTTTTAAATATTTCGACACGACAATCGACCGTAAGCG
CTATACCAGTACGAAAGAAGTGTTGGATGCGACCCTTATTCACCAGTCAATTACAGGATTATATGAGACCCGTATCG
ACCTTAGCCAATTAGGTGGGGATGCACCTGCGATGGTTAGCAAAGGTGAAGAACTGTTTACCGGCGTTGTGCCGATT
CTGGTGGAACTGGATGGTGATGTGAATGGCCATAAATTTAGCGTTagcGGCGAAGGCGAAGGTGATGCGACCtatGG
TAAACTGACCCTGAAATTTATTTGCACCACCGGTAAACTGCCGGTTCCGTGGCCGACCCTGGTGACCACCCTGACCT
ATGGCGTTCAGTGCTTTAGCCGCTATCCGGATCATATGAAAcagCATGATTTCTTTAAAAGCGCGATGCCGGAAGGC
TATGTGCAGGAACGTACCATTtttTTCAAAGATGATGGCaacTATAAAACCCGTGCGGAAGTTAAATTTGAAGGCGA
TACCCTGGTGAACCGCATTGAACTGAAAGGTATTGATTTTAAAGAAGATGGCAACATTCTGGGTCATAAACTGGAAT
ATAATtacAACAGCCATAATGTGTATATTatgGCCGATAAACAGAAAAATGGCATCAAAgtgAACTTTAAAATCCGT
CACAACattGAAGATGGTAGCGTGCAGCTGGCGGATCATTATCAGCAGAATACCCCGATTGGTGATGGCCCGGTGCT
GCTGCCGGATAATCATTATCTGAGCACCCAGAGCgcgCTGAGCAAAGATCCGAATGAAAAACGTGATCATATGGTGC
TGCTGGAATTTGTTACCGCCGCGGGCATTACCctgGGTATGGATGAACTGTATAAA
(Cas9-APAPA(SEQ ID NO: 11)-eGFP chimera DNA sequence)
SEQ ID NO: 355
ATGGACAAAAAGTACTCTATTGGCCTGGATATCGGGACCAACAGCGTCGGGTGGGCTGTTATCACCGACGAGTATAA
AGTACCTTCGAAAAAGTTCAAAGTGCTGGGCAACACCGATCGCCATTCAATCAAAAAGAACTTGATTGGTGCGCTGT
TGTTTGACTCCGGGGAAACCGCCGAGGCGACTCGCCTTAAACGTACAGCACGTCGCCGGTACACTCGGCGTAAGAAT
CGCATTTGCTATTTGCAGGAAATCTTTAGCAACGAGATGGCAAAAGTCGATGACTCGTTTTTCCACCGCCTCGAGGA
AAGCTTTCTGGTGGAGGAAGACAAAAAGCATGAGCGTCACCCGATCTTCGGCAACATTGTCGATGAAGTAGCGTATC
ATGAAAAATACCCAACCATTTACCACTTACGCAAAAAGCTGGTGGACAGCACTGACAAAGCTGATTTGCGCCTTATC
TATTTAGCCCTGGCACATATGATTAAGTTTCGTGGTCACTTCCTGATCGAAGGAGACTTAAATCCCGACAACAGTGA
TGTTGATAAATTGTTTATTCAGCTTGTCCAAACTTACAATCAACTGTTCGAGGAAAACCCGATCAATGCCTCCGGTG
TGGATGCAAAAGCCATTTTAAGTGCACGCCTTAGCAAGTCCCGTCGCTTAGAAAACCTTATCGCGCAGCTGCCCGGC
GAGAAAAAGAATGGTTTGTTTGGGAACCTTATTGCCTTGAGCTTAGGCCTCACCCCGAATTTCAAAAGTAATTTCGA
TCTTGCAGAAGACGCCAAATTACAACTGTCGAAGGATACTTATGATGACGATCTCGATAATCTGTTAGCGCAGATTG
GTGACCAATACGCCGATCTTTTTCTGGCGGCTAAAAATCTGAGCGACGCCATCTTGCTTTCGGATATTCTCCGCGTT
AACACCGAAATCACGAAAGCGCCTCTTAGTGCCAGCATGATTAAACGTTATGATGAACACCACCAGGACCTGACCTT
ACTCAAAGCGTTGGTTCGCCAGCAACTGCCAGAGAAGTACAAAGAAATCTTCTTTGATCAGTCAAAGAATGGTTATG
CCGGCTATATTGACGGGGGTGCAAGCCAAGAGGAATTCTACAAATTTATCAAGCCTATTCTGGAGAAAATGGATGGC
ACCGAAGAGTTATTGGTGAAGCTTAACCGTGAAGACCTCCTGCGGAAACAGCGCACATTCGATAATGGTTCGATCCC
ACACCAAATCCATTTGGGGGAGTTACACGCTATTTTGCGTCGCCAGGAAGACTTTTACCCTTTCCTGAAGGATAACC
GGGAGAAAATTGAGAAGATCCTTACCTTTCGTATTCCGTATTACGTAGGCCCCTTAGCACGGGGTAATAGCCGTTTC
GCGTGGATGACACGGAAGTCGGAAGAGACGATCACCCCGTGGAACTTCGAAGAGGTAGTCGACAAGGGCGCATCAGC
GCAGTCTTTTATTGAACGTATGACGAATTTCGATAAAAACTTGCCCAATGAGAAGGTGCTTCCGAAACATTCCTTGT
TATATGAATATTTTACAGTTTACAACGAGCTGACCAAGGTTAAATACGTGACGGAAGGAATGCGCAAGCCCGCTTTT
CTTAGCGGTGAGCAAAAAAAGGCGATCGTCGACCTGTTATTCAAAACGAATCGTAAGGTGACTGTAAAGCAACTCAA
AGAAGATTACTTCAAAAAGATTGAGTGCTTCGACAGCGTCGAAATCTCTGGGGTAGAGGATCGGTTTAACGCAAGTT
TAGGTACCTACCATGACCTGCTTAAAATCATTAAGGATAAAGACTTCTTAGATAATGAAGAGAACGAAGATATTCTC
GAGGACATCGTCTTGACGTTAACCTTATTTGAGGATCGTGAAATGATTGAGGAACGCCTCAAAACTTATGCCCACCT
GTTCGACGATAAGGTGATGAAGCAGCTGAAACGTCGGCGCTACACAGGATGGGGCCGCTTGAGTCGCAAACTTATTA
ACGGAATCCGTGACAAGCAATCCGGCAAAACGATTCTGGATTTCTTGAAGTCGGACGGATTTGCTAATCGCAACTTC
ATGCAGTTGATCCATGATGACTCCCTGACTTTTAAAGAGGATATTCAAAAGGCGCAGGTTAGTGGTCAAGGCGACAG
CTTACACGAACACATCGCAAATTTGGCTGGTTCGCCGGCCATTAAAAAGGGGATCCTCCAGACCGTGAAAGTTGTAG
ATGAGCTTGTTAAGGTCATGGGTCGTCATAAGCCCGAAAACATCGTGATTGAAATGGCGCGGGAGAATCAAACGACC
CAGAAAGGACAAAAGAATAGCCGTGAACGGATGAAGCGGATCGAGGAAGGCATTAAAGAGCTGGGGTCTCAAATCTT
GAAGGAACACCCTGTGGAGAACACTCAGCTCCAAAATGAAAAACTTTACCTGTACTATTTGCAGAACGGACGCGATA
TGTACGTGGACCAAGAGTTGGATATTAATCGGCTGAGTGACTACGACGTTGATCATATCGTCCCGCAGAGCTTCCTC
AAAGACGATTCTATTGACAATAAGGTACTGACGCGCTCTGATAAAAACCGTGGTAAGTCGGACAACGTGCCCTCCGA
AGAGGTTGTGAAAAAGATGAAAAATTATTGGCGCCAGCTTTTAAACGCGAAGCTGATCACACAACGTAAATTCGATA
ATTTGACCAAGGCTGAACGGGGTGGCCTGAGCGAGTTAGATAAGGCAGGATTTATTAAACGCCAGTTAGTGGAGACT
CGTCAAATCACCAAACATGTCGCGCAGATTTTGGACAGCCGGATGAACACCAAGTACGATGAAAATGACAAACTGAT
CCGTGAGGTGAAAGTCATTACTCTGAAGTCCAAATTAGTTAGTGATTTCCGGAAGGACTTTCAATTCTACAAAGTCC
GTGAAATTAATAACTATCATCACGCACATGACGCGTACCTGAATGCAGTGGTTGGGACCGCCCTTATCAAGAAATAT
CCTAAGCTGGAGTCGGAGTTTGTCTATGGCGACTATAAGGTATACGATGTTCGCAAAATGATTGCGAAATCTGAGCA
GGAGATCGGTAAGGCAACCGCAAAATATTTCTTTTACTCAAACATTATGAATTTCTTTAAGACAGAAATCACTCTGG
CCAACGGGGAGATTCGCAAACGTCCGTTGATCGAAACAAACGGCGAGACTGGCGAAATTGTTTGGGACAAAGGGCGT
GATTTCGCGACGGTGCGCAAGGTACTGAGCATGCCTCAAGTCAATATTGTTAAGAAAACCGAAGTGCAGACGGGCGG
GTTTTCCAAGGAAAGCATCTTACCCAAACGTAATTCAGATAAACTTATTGCACGCAAAAAGGACTGGGATCCGAAAA
AGTATGGAGGCTTCGACAGTCCAACCGTAGCCTACTCTGTTCTCGTTGTAGCGAAAGTAGAAAAGGGTAAATCCAAG
AAACTGAAATCTGTCAAGGAGTTGCTTGGAATCACCATTATGGAGCGTAGCTCCTTCGAGAAGAACCCGATTGACTT
TCTGGAAGCCAAAGGATATAAAGAGGTCAAGAAAGATCTTATCATTAAGCTGCCTAAGTATTCACTCTTCGAGCTGG
AAAATGGTCGTAAACGCATGCTCGCTTCTGCCGGCGAGTTGCAGAAGGGCAATGAATTAGCACTTCCATCAAAGTAC
GTTAACTTCCTGTATTTGGCCAGCCATTACGAGAAACTGAAGGGGTCTCCAGAGGACAACGAACAGAAACAATTATT
TGTAGAGCAGCACAAGCATTATCTTGATGAAATCATTGAGCAAATTTCCGAATTCAGTAAACGCGTAATCCTGGCCG
ATGCAAACCTCGACAAGGTGCTGAGCGCTTACAATAAGCATCGCGACAAACCTATCCGTGAGCAGGCTGAAAATATC
ATTCACCTGTTCACATTAACGAACCTGGGCGCTCCGGCCGCTTTTAAATATTTCGACACGACAATCGACCGTAAGCG
CTATACCAGTACGAAAGAAGTGTTGGATGCGACCCTTATTCACCAGTCAATTACAGGATTATATGAGACCCGTATCG
ACCTTAGCCAATTAGGTGGGGATGCTCCTGCACCTGCGATGGTTAGCAAAGGTGAAGAACTGTTTACCGGCGTTGTG
CCGATTCTGGTGGAACTGGATGGTGATGTGAATGGCCATAAATTTAGCGTTagcGGCGAAGGCGAAGGTGATGCGAC
CtatGGTAAACTGACCCTGAAATTTATTTGCACCACCGGTAAACTGCCGGTTCCGTGGCCGACCCTGGTGACCACCC
TGACCTATGGCGTTCAGTGCTTTAGCCGCTATCCGGATCATATGAAAcagCATGATTTCTTTAAAAGCGCGATGCCG
GAAGGCTATGTGCAGGAACGTACCATTtttTTCAAAGATGATGGCaacTATAAAACCCGTGCGGAAGTTAAATTTGA
AGGCGATACCCTGGTGAACCGCATTGAACTGAAAGGTATTGATTTTAAAGAAGATGGCAACATTCTGGGTCATAAAC
TGGAATATAATtacAACAGCCATAATGTGTATATTatgGCCGATAAACAGAAAAATGGCATCAAAgtgAACTTTAAA
ATCCGTCACAACattGAAGATGGTAGCGTGCAGCTGGCGGATCATTATCAGCAGAATACCCCGATTGGTGATGGCCC
GGTGCTGCTGCCGGATAATCATTATCTGAGCACCCAGAGCgcgCTGAGCAAAGATCCGAATGAAAAACGTGATCATA
TGGTGCTGCTGGAATTTGTTACCGCCGCGGGCATTACCctgGGTATGGATGAACTGTATAAA
(Cas9-APAPAPA(SEQ ID NO: 12)-eGFP chimera DNA sequence)
SEQ ID NO: 356
ATGGACAAAAAGTACTCTATTGGCCTGGATATCGGGACCAACAGCGTCGGGTGGGCTGTTATCACCGACGAGTATAA
AGTACCTTCGAAAAAGTTCAAAGTGCTGGGCAACACCGATCGCCATTCAATCAAAAAGAACTTGATTGGTGCGCTGT
TGTTTGACTCCGGGGAAACCGCCGAGGCGACTCGCCTTAAACGTACAGCACGTCGCCGGTACACTCGGCGTAAGAAT
CGCATTTGCTATTTGCAGGAAATCTTTAGCAACGAGATGGCAAAAGTCGATGACTCGTTTTTCCACCGCCTCGAGGA
AAGCTTTCTGGTGGAGGAAGACAAAAAGCATGAGCGTCACCCGATCTTCGGCAACATTGTCGATGAAGTAGCGTATC
ATGAAAAATACCCAACCATTTACCACTTACGCAAAAAGCTGGTGGACAGCACTGACAAAGCTGATTTGCGCCTTATC
TATTTAGCCCTGGCACATATGATTAAGTTTCGTGGTCACTTCCTGATCGAAGGAGACTTAAATCCCGACAACAGTGA
TGTTGATAAATTGTTTATTCAGCTTGTCCAAACTTACAATCAACTGTTCGAGGAAAACCCGATCAATGCCTCCGGTG
TGGATGCAAAAGCCATTTTAAGTGCACGCCTTAGCAAGTCCCGTCGCTTAGAAAACCTTATCGCGCAGCTGCCCGGC
GAGAAAAAGAATGGTTTGTTTGGGAACCTTATTGCCTTGAGCTTAGGCCTCACCCCGAATTTCAAAAGTAATTTCGA
TCTTGCAGAAGACGCCAAATTACAACTGTCGAAGGATACTTATGATGACGATCTCGATAATCTGTTAGCGCAGATTG
GTGACCAATACGCCGATCTTTTTCTGGCGGCTAAAAATCTGAGCGACGCCATCTTGCTTTCGGATATTCTCCGCGTT
AACACCGAAATCACGAAAGCGCCTCTTAGTGCCAGCATGATTAAACGTTATGATGAACACCACCAGGACCTGACCTT
ACTCAAAGCGTTGGTTCGCCAGCAACTGCCAGAGAAGTACAAAGAAATCTTCTTTGATCAGTCAAAGAATGGTTATG
CCGGCTATATTGACGGGGGTGCAAGCCAAGAGGAATTCTACAAATTTATCAAGCCTATTCTGGAGAAAATGGATGGC
ACCGAAGAGTTATTGGTGAAGCTTAACCGTGAAGACCTCCTGCGGAAACAGCGCACATTCGATAATGGTTCGATCCC
ACACCAAATCCATTTGGGGGAGTTACACGCTATTTTGCGTCGCCAGGAAGACTTTTACCCTTTCCTGAAGGATAACC
GGGAGAAAATTGAGAAGATCCTTACCTTTCGTATTCCGTATTACGTAGGCCCCTTAGCACGGGGTAATAGCCGTTTC
GCGTGGATGACACGGAAGTCGGAAGAGACGATCACCCCGTGGAACTTCGAAGAGGTAGTCGACAAGGGCGCATCAGC
GCAGTCTTTTATTGAACGTATGACGAATTTCGATAAAAACTTGCCCAATGAGAAGGTGCTTCCGAAACATTCCTTGT
TATATGAATATTTTACAGTTTACAACGAGCTGACCAAGGTTAAATACGTGACGGAAGGAATGCGCAAGCCCGCTTTT
CTTAGCGGTGAGCAAAAAAAGGCGATCGTCGACCTGTTATTCAAAACGAATCGTAAGGTGACTGTAAAGCAACTCAA
AGAAGATTACTTCAAAAAGATTGAGTGCTTCGACAGCGTCGAAATCTCTGGGGTAGAGGATCGGTTTAACGCAAGTT
TAGGTACCTACCATGACCTGCTTAAAATCATTAAGGATAAAGACTTCTTAGATAATGAAGAGAACGAAGATATTCTC
GAGGACATCGTCTTGACGTTAACCTTATTTGAGGATCGTGAAATGATTGAGGAACGCCTCAAAACTTATGCCCACCT
GTTCGACGATAAGGTGATGAAGCAGCTGAAACGTCGGCGCTACACAGGATGGGGCCGCTTGAGTCGCAAACTTATTA
ACGGAATCCGTGACAAGCAATCCGGCAAAACGATTCTGGATTTCTTGAAGTCGGACGGATTTGCTAATCGCAACTTC
ATGCAGTTGATCCATGATGACTCCCTGACTTTTAAAGAGGATATTCAAAAGGCGCAGGTTAGTGGTCAAGGCGACAG
CTTACACGAACACATCGCAAATTTGGCTGGTTCGCCGGCCATTAAAAAGGGGATCCTCCAGACCGTGAAAGTTGTAG
ATGAGCTTGTTAAGGTCATGGGTCGTCATAAGCCCGAAAACATCGTGATTGAAATGGCGCGGGAGAATCAAACGACC
CAGAAAGGACAAAAGAATAGCCGTGAACGGATGAAGCGGATCGAGGAAGGCATTAAAGAGCTGGGGTCTCAAATCTT
GAAGGAACACCCTGTGGAGAACACTCAGCTCCAAAATGAAAAACTTTACCTGTACTATTTGCAGAACGGACGCGATA
TGTACGTGGACCAAGAGTTGGATATTAATCGGCTGAGTGACTACGACGTTGATCATATCGTCCCGCAGAGCTTCCTC
AAAGACGATTCTATTGACAATAAGGTACTGACGCGCTCTGATAAAAACCGTGGTAAGTCGGACAACGTGCCCTCCGA
AGAGGTTGTGAAAAAGATGAAAAATTATTGGCGCCAGCTTTTAAACGCGAAGCTGATCACACAACGTAAATTCGATA
ATTTGACCAAGGCTGAACGGGGTGGCCTGAGCGAGTTAGATAAGGCAGGATTTATTAAACGCCAGTTAGTGGAGACT
CGTCAAATCACCAAACATGTCGCGCAGATTTTGGACAGCCGGATGAACACCAAGTACGATGAAAATGACAAACTGAT
CCGTGAGGTGAAAGTCATTACTCTGAAGTCCAAATTAGTTAGTGATTTCCGGAAGGACTTTCAATTCTACAAAGTCC
GTGAAATTAATAACTATCATCACGCACATGACGCGTACCTGAATGCAGTGGTTGGGACCGCCCTTATCAAGAAATAT
CCTAAGCTGGAGTCGGAGTTTGTCTATGGCGACTATAAGGTATACGATGTTCGCAAAATGATTGCGAAATCTGAGCA
GGAGATCGGTAAGGCAACCGCAAAATATTTCTTTTACTCAAACATTATGAATTTCTTTAAGACAGAAATCACTCTGG
CCAACGGGGAGATTCGCAAACGTCCGTTGATCGAAACAAACGGCGAGACTGGCGAAATTGTTTGGGACAAAGGGCGT
GATTTCGCGACGGTGCGCAAGGTACTGAGCATGCCTCAAGTCAATATTGTTAAGAAAACCGAAGTGCAGACGGGCGG
GTTTTCCAAGGAAAGCATCTTACCCAAACGTAATTCAGATAAACTTATTGCACGCAAAAAGGACTGGGATCCGAAAA
AGTATGGAGGCTTCGACAGTCCAACCGTAGCCTACTCTGTTCTCGTTGTAGCGAAAGTAGAAAAGGGTAAATCCAAG
AAACTGAAATCTGTCAAGGAGTTGCTTGGAATCACCATTATGGAGCGTAGCTCCTTCGAGAAGAACCCGATTGACTT
TCTGGAAGCCAAAGGATATAAAGAGGTCAAGAAAGATCTTATCATTAAGCTGCCTAAGTATTCACTCTTCGAGCTGG
AAAATGGTCGTAAACGCATGCTCGCTTCTGCCGGCGAGTTGCAGAAGGGCAATGAATTAGCACTTCCATCAAAGTAC
GTTAACTTCCTGTATTTGGCCAGCCATTACGAGAAACTGAAGGGGTCTCCAGAGGACAACGAACAGAAACAATTATT
TGTAGAGCAGCACAAGCATTATCTTGATGAAATCATTGAGCAAATTTCCGAATTCAGTAAACGCGTAATCCTGGCCG
ATGCAAACCTCGACAAGGTGCTGAGCGCTTACAATAAGCATCGCGACAAACCTATCCGTGAGCAGGCTGAAAATATC
ATTCACCTGTTCACATTAACGAACCTGGGCGCTCCGGCCGCTTTTAAATATTTCGACACGACAATCGACCGTAAGCG
CTATACCAGTACGAAAGAAGTGTTGGATGCGACCCTTATTCACCAGTCAATTACAGGATTATATGAGACCCGTATCG
ACCTTAGCCAATTAGGTGGGGATGCGCCAGCTCCTGCACCTGCGATGGTTAGCAAAGGTGAAGAACTGTTTACCGGC
GTTGTGCCGATTCTGGTGGAACTGGATGGTGATGTGAATGGCCATAAATTTAGCGTTagcGGCGAAGGCGAAGGTGA
TGCGACCtatGGTAAACTGACCCTGAAATTTATTTGCACCACCGGTAAACTGCCGGTTCCGTGGCCGACCCTGGTGA
CCACCCTGACCTATGGCGTTCAGTGCTTTAGCCGCTATCCGGATCATATGAAAcagCATGATTTCTTTAAAAGCGCG
ATGCCGGAAGGCTATGTGCAGGAACGTACCATTtttTTCAAAGATGATGGCaacTATAAAACCCGTGCGGAAGTTAA
ATTTGAAGGCGATACCCTGGTGAACCGCATTGAACTGAAAGGTATTGATTTTAAAGAAGATGGCAACATTCTGGGTC
ATAAACTGGAATATAATtacAACAGCCATAATGTGTATATTatgGCCGATAAACAGAAAAATGGCATCAAAgtgAAC
TTTAAAATCCGTCACAACattGAAGATGGTAGCGTGCAGCTGGCGGATCATTATCAGCAGAATACCCCGATTGGTGA
TGGCCCGGTGCTGCTGCCGGATAATCATTATCTGAGCACCCAGAGCgcgCTGAGCAAAGATCCGAATGAAAAACGTG
ATCATATGGTGCTGCTGGAATTTGTTACCGCCGCGGGCATTACCctgGGTATGGATGAACTGTATAAA
(Cas9-APAPAPAPA(SEQ ID NO: 13)-eGFP chimera DNA sequence)
SEQ ID NO: 357
ATGGACAAAAAGTACTCTATTGGCCTGGATATCGGGACCAACAGCGTCGGGTGGGCTGTTATCACCGACGAGTATAA
AGTACCTTCGAAAAAGTTCAAAGTGCTGGGCAACACCGATCGCCATTCAATCAAAAAGAACTTGATTGGTGCGCTGT
TGTTTGACTCCGGGGAAACCGCCGAGGCGACTCGCCTTAAACGTACAGCACGTCGCCGGTACACTCGGCGTAAGAAT
CGCATTTGCTATTTGCAGGAAATCTTTAGCAACGAGATGGCAAAAGTCGATGACTCGTTTTTCCACCGCCTCGAGGA
AAGCTTTCTGGTGGAGGAAGACAAAAAGCATGAGCGTCACCCGATCTTCGGCAACATTGTCGATGAAGTAGCGTATC
ATGAAAAATACCCAACCATTTACCACTTACGCAAAAAGCTGGTGGACAGCACTGACAAAGCTGATTTGCGCCTTATC
TATTTAGCCCTGGCACATATGATTAAGTTTCGTGGTCACTTCCTGATCGAAGGAGACTTAAATCCCGACAACAGTGA
TGTTGATAAATTGTTTATTCAGCTTGTCCAAACTTACAATCAACTGTTCGAGGAAAACCCGATCAATGCCTCCGGTG
TGGATGCAAAAGCCATTTTAAGTGCACGCCTTAGCAAGTCCCGTCGCTTAGAAAACCTTATCGCGCAGCTGCCCGGC
GAGAAAAAGAATGGTTTGTTTGGGAACCTTATTGCCTTGAGCTTAGGCCTCACCCCGAATTTCAAAAGTAATTTCGA
TCTTGCAGAAGACGCCAAATTACAACTGTCGAAGGATACTTATGATGACGATCTCGATAATCTGTTAGCGCAGATTG
GTGACCAATACGCCGATCTTTTTCTGGCGGCTAAAAATCTGAGCGACGCCATCTTGCTTTCGGATATTCTCCGCGTT
AACACCGAAATCACGAAAGCGCCTCTTAGTGCCAGCATGATTAAACGTTATGATGAACACCACCAGGACCTGACCTT
ACTCAAAGCGTTGGTTCGCCAGCAACTGCCAGAGAAGTACAAAGAAATCTTCTTTGATCAGTCAAAGAATGGTTATG
CCGGCTATATTGACGGGGGTGCAAGCCAAGAGGAATTCTACAAATTTATCAAGCCTATTCTGGAGAAAATGGATGGC
ACCGAAGAGTTATTGGTGAAGCTTAACCGTGAAGACCTCCTGCGGAAACAGCGCACATTCGATAATGGTTCGATCCC
ACACCAAATCCATTTGGGGGAGTTACACGCTATTTTGCGTCGCCAGGAAGACTTTTACCCTTTCCTGAAGGATAACC
GGGAGAAAATTGAGAAGATCCTTACCTTTCGTATTCCGTATTACGTAGGCCCCTTAGCACGGGGTAATAGCCGTTTC
GCGTGGATGACACGGAAGTCGGAAGAGACGATCACCCCGTGGAACTTCGAAGAGGTAGTCGACAAGGGCGCATCAGC
GCAGTCTTTTATTGAACGTATGACGAATTTCGATAAAAACTTGCCCAATGAGAAGGTGCTTCCGAAACATTCCTTGT
TATATGAATATTTTACAGTTTACAACGAGCTGACCAAGGTTAAATACGTGACGGAAGGAATGCGCAAGCCCGCTTTT
CTTAGCGGTGAGCAAAAAAAGGCGATCGTCGACCTGTTATTCAAAACGAATCGTAAGGTGACTGTAAAGCAACTCAA
AGAAGATTACTTCAAAAAGATTGAGTGCTTCGACAGCGTCGAAATCTCTGGGGTAGAGGATCGGTTTAACGCAAGTT
TAGGTACCTACCATGACCTGCTTAAAATCATTAAGGATAAAGACTTCTTAGATAATGAAGAGAACGAAGATATTCTC
GAGGACATCGTCTTGACGTTAACCTTATTTGAGGATCGTGAAATGATTGAGGAACGCCTCAAAACTTATGCCCACCT
GTTCGACGATAAGGTGATGAAGCAGCTGAAACGTCGGCGCTACACAGGATGGGGCCGCTTGAGTCGCAAACTTATTA
ACGGAATCCGTGACAAGCAATCCGGCAAAACGATTCTGGATTTCTTGAAGTCGGACGGATTTGCTAATCGCAACTTC
ATGCAGTTGATCCATGATGACTCCCTGACTTTTAAAGAGGATATTCAAAAGGCGCAGGTTAGTGGTCAAGGCGACAG
CTTACACGAACACATCGCAAATTTGGCTGGTTCGCCGGCCATTAAAAAGGGGATCCTCCAGACCGTGAAAGTTGTAG
ATGAGCTTGTTAAGGTCATGGGTCGTCATAAGCCCGAAAACATCGTGATTGAAATGGCGCGGGAGAATCAAACGACC
CAGAAAGGACAAAAGAATAGCCGTGAACGGATGAAGCGGATCGAGGAAGGCATTAAAGAGCTGGGGTCTCAAATCTT
GAAGGAACACCCTGTGGAGAACACTCAGCTCCAAAATGAAAAACTTTACCTGTACTATTTGCAGAACGGACGCGATA
TGTACGTGGACCAAGAGTTGGATATTAATCGGCTGAGTGACTACGACGTTGATCATATCGTCCCGCAGAGCTTCCTC
AAAGACGATTCTATTGACAATAAGGTACTGACGCGCTCTGATAAAAACCGTGGTAAGTCGGACAACGTGCCCTCCGA
AGAGGTTGTGAAAAAGATGAAAAATTATTGGCGCCAGCTTTTAAACGCGAAGCTGATCACACAACGTAAATTCGATA
ATTTGACCAAGGCTGAACGGGGTGGCCTGAGCGAGTTAGATAAGGCAGGATTTATTAAACGCCAGTTAGTGGAGACT
CGTCAAATCACCAAACATGTCGCGCAGATTTTGGACAGCCGGATGAACACCAAGTACGATGAAAATGACAAACTGAT
CCGTGAGGTGAAAGTCATTACTCTGAAGTCCAAATTAGTTAGTGATTTCCGGAAGGACTTTCAATTCTACAAAGTCC
GTGAAATTAATAACTATCATCACGCACATGACGCGTACCTGAATGCAGTGGTTGGGACCGCCCTTATCAAGAAATAT
CCTAAGCTGGAGTCGGAGTTTGTCTATGGCGACTATAAGGTATACGATGTTCGCAAAATGATTGCGAAATCTGAGCA
GGAGATCGGTAAGGCAACCGCAAAATATTTCTTTTACTCAAACATTATGAATTTCTTTAAGACAGAAATCACTCTGG
CCAACGGGGAGATTCGCAAACGTCCGTTGATCGAAACAAACGGCGAGACTGGCGAAATTGTTTGGGACAAAGGGCGT
GATTTCGCGACGGTGCGCAAGGTACTGAGCATGCCTCAAGTCAATATTGTTAAGAAAACCGAAGTGCAGACGGGCGG
GTTTTCCAAGGAAAGCATCTTACCCAAACGTAATTCAGATAAACTTATTGCACGCAAAAAGGACTGGGATCCGAAAA
AGTATGGAGGCTTCGACAGTCCAACCGTAGCCTACTCTGTTCTCGTTGTAGCGAAAGTAGAAAAGGGTAAATCCAAG
AAACTGAAATCTGTCAAGGAGTTGCTTGGAATCACCATTATGGAGCGTAGCTCCTTCGAGAAGAACCCGATTGACTT
TCTGGAAGCCAAAGGATATAAAGAGGTCAAGAAAGATCTTATCATTAAGCTGCCTAAGTATTCACTCTTCGAGCTGG
AAAATGGTCGTAAACGCATGCTCGCTTCTGCCGGCGAGTTGCAGAAGGGCAATGAATTAGCACTTCCATCAAAGTAC
GTTAACTTCCTGTATTTGGCCAGCCATTACGAGAAACTGAAGGGGTCTCCAGAGGACAACGAACAGAAACAATTATT
TGTAGAGCAGCACAAGCATTATCTTGATGAAATCATTGAGCAAATTTCCGAATTCAGTAAACGCGTAATCCTGGCCG
ATGCAAACCTCGACAAGGTGCTGAGCGCTTACAATAAGCATCGCGACAAACCTATCCGTGAGCAGGCTGAAAATATC
ATTCACCTGTTCACATTAACGAACCTGGGCGCTCCGGCCGCTTTTAAATATTTCGACACGACAATCGACCGTAAGCG
CTATACCAGTACGAAAGAAGTGTTGGATGCGACCCTTATTCACCAGTCAATTACAGGATTATATGAGACCCGTATCG
ACCTTAGCCAATTAGGTGGGGATGCTCCTGCGCCAGCTCCTGCACCTGCGATGGTTAGCAAAGGTGAAGAACTGTTT
ACCGGCGTTGTGCCGATTCTGGTGGAACTGGATGGTGATGTGAATGGCCATAAATTTAGCGTTagcGGCGAAGGCGA
AGGTGATGCGACCtatGGTAAACTGACCCTGAAATTTATTTGCACCACCGGTAAACTGCCGGTTCCGTGGCCGACCC
TGGTGACCACCCTGACCTATGGCGTTCAGTGCTTTAGCCGCTATCCGGATCATATGAAAcagCATGATTTCTTTAAA
AGCGCGATGCCGGAAGGCTATGTGCAGGAACGTACCATTtttTTCAAAGATGATGGCaacTATAAAACCCGTGCGGA
AGTTAAATTTGAAGGCGATACCCTGGTGAACCGCATTGAACTGAAAGGTATTGATTTTAAAGAAGATGGCAACATTC
TGGGTCATAAACTGGAATATAATtacAACAGCCATAATGTGTATATTatgGCCGATAAACAGAAAAATGGCATCAAA
gtgAACTTTAAAATCCGTCACAACattGAAGATGGTAGCGTGCAGCTGGCGGATCATTATCAGCAGAATACCCCGAT
TGGTGATGGCCCGGTGCTGCTGCCGGATAATCATTATCTGAGCACCCAGAGCgcgCTGAGCAAAGATCCGAATGAAA
AACGTGATCATATGGTGCTGCTGGAATTTGTTACCGCCGCGGGCATTACCctgGGTATGGATGAACTGTATAAA
(Cas9-APAPAPAPAPA(SEQ ID NO: 14)-eGFP chimera DNA sequence)
SEQ ID NO: 358
ATGGACAAAAAGTACTCTATTGGCCTGGATATCGGGACCAACAGCGTCGGGTGGGCTGTTATCACCGACGAGTATAA
AGTACCTTCGAAAAAGTTCAAAGTGCTGGGCAACACCGATCGCCATTCAATCAAAAAGAACTTGATTGGTGCGCTGT
TGTTTGACTCCGGGGAAACCGCCGAGGCGACTCGCCTTAAACGTACAGCACGTCGCCGGTACACTCGGCGTAAGAAT
CGCATTTGCTATTTGCAGGAAATCTTTAGCAACGAGATGGCAAAAGTCGATGACTCGTTTTTCCACCGCCTCGAGGA
AAGCTTTCTGGTGGAGGAAGACAAAAAGCATGAGCGTCACCCGATCTTCGGCAACATTGTCGATGAAGTAGCGTATC
ATGAAAAATACCCAACCATTTACCACTTACGCAAAAAGCTGGTGGACAGCACTGACAAAGCTGATTTGCGCCTTATC
TATTTAGCCCTGGCACATATGATTAAGTTTCGTGGTCACTTCCTGATCGAAGGAGACTTAAATCCCGACAACAGTGA
TGTTGATAAATTGTTTATTCAGCTTGTCCAAACTTACAATCAACTGTTCGAGGAAAACCCGATCAATGCCTCCGGTG
TGGATGCAAAAGCCATTTTAAGTGCACGCCTTAGCAAGTCCCGTCGCTTAGAAAACCTTATCGCGCAGCTGCCCGGC
GAGAAAAAGAATGGTTTGTTTGGGAACCTTATTGCCTTGAGCTTAGGCCTCACCCCGAATTTCAAAAGTAATTTCGA
TCTTGCAGAAGACGCCAAATTACAACTGTCGAAGGATACTTATGATGACGATCTCGATAATCTGTTAGCGCAGATTG
GTGACCAATACGCCGATCTTTTTCTGGCGGCTAAAAATCTGAGCGACGCCATCTTGCTTTCGGATATTCTCCGCGTT
AACACCGAAATCACGAAAGCGCCTCTTAGTGCCAGCATGATTAAACGTTATGATGAACACCACCAGGACCTGACCTT
ACTCAAAGCGTTGGTTCGCCAGCAACTGCCAGAGAAGTACAAAGAAATCTTCTTTGATCAGTCAAAGAATGGTTATG
CCGGCTATATTGACGGGGGTGCAAGCCAAGAGGAATTCTACAAATTTATCAAGCCTATTCTGGAGAAAATGGATGGC
ACCGAAGAGTTATTGGTGAAGCTTAACCGTGAAGACCTCCTGCGGAAACAGCGCACATTCGATAATGGTTCGATCCC
ACACCAAATCCATTTGGGGGAGTTACACGCTATTTTGCGTCGCCAGGAAGACTTTTACCCTTTCCTGAAGGATAACC
GGGAGAAAATTGAGAAGATCCTTACCTTTCGTATTCCGTATTACGTAGGCCCCTTAGCACGGGGTAATAGCCGTTTC
GCGTGGATGACACGGAAGTCGGAAGAGACGATCACCCCGTGGAACTTCGAAGAGGTAGTCGACAAGGGCGCATCAGC
GCAGTCTTTTATTGAACGTATGACGAATTTCGATAAAAACTTGCCCAATGAGAAGGTGCTTCCGAAACATTCCTTGT
TATATGAATATTTTACAGTTTACAACGAGCTGACCAAGGTTAAATACGTGACGGAAGGAATGCGCAAGCCCGCTTTT
CTTAGCGGTGAGCAAAAAAAGGCGATCGTCGACCTGTTATTCAAAACGAATCGTAAGGTGACTGTAAAGCAACTCAA
AGAAGATTACTTCAAAAAGATTGAGTGCTTCGACAGCGTCGAAATCTCTGGGGTAGAGGATCGGTTTAACGCAAGTT
TAGGTACCTACCATGACCTGCTTAAAATCATTAAGGATAAAGACTTCTTAGATAATGAAGAGAACGAAGATATTCTC
GAGGACATCGTCTTGACGTTAACCTTATTTGAGGATCGTGAAATGATTGAGGAACGCCTCAAAACTTATGCCCACCT
GTTCGACGATAAGGTGATGAAGCAGCTGAAACGTCGGCGCTACACAGGATGGGGCCGCTTGAGTCGCAAACTTATTA
ACGGAATCCGTGACAAGCAATCCGGCAAAACGATTCTGGATTTCTTGAAGTCGGACGGATTTGCTAATCGCAACTTC
ATGCAGTTGATCCATGATGACTCCCTGACTTTTAAAGAGGATATTCAAAAGGCGCAGGTTAGTGGTCAAGGCGACAG
CTTACACGAACACATCGCAAATTTGGCTGGTTCGCCGGCCATTAAAAAGGGGATCCTCCAGACCGTGAAAGTTGTAG
ATGAGCTTGTTAAGGTCATGGGTCGTCATAAGCCCGAAAACATCGTGATTGAAATGGCGCGGGAGAATCAAACGACC
CAGAAAGGACAAAAGAATAGCCGTGAACGGATGAAGCGGATCGAGGAAGGCATTAAAGAGCTGGGGTCTCAAATCTT
GAAGGAACACCCTGTGGAGAACACTCAGCTCCAAAATGAAAAACTTTACCTGTACTATTTGCAGAACGGACGCGATA
TGTACGTGGACCAAGAGTTGGATATTAATCGGCTGAGTGACTACGACGTTGATCATATCGTCCCGCAGAGCTTCCTC
AAAGACGATTCTATTGACAATAAGGTACTGACGCGCTCTGATAAAAACCGTGGTAAGTCGGACAACGTGCCCTCCGA
AGAGGTTGTGAAAAAGATGAAAAATTATTGGCGCCAGCTTTTAAACGCGAAGCTGATCACACAACGTAAATTCGATA
ATTTGACCAAGGCTGAACGGGGTGGCCTGAGCGAGTTAGATAAGGCAGGATTTATTAAACGCCAGTTAGTGGAGACT
CGTCAAATCACCAAACATGTCGCGCAGATTTTGGACAGCCGGATGAACACCAAGTACGATGAAAATGACAAACTGAT
CCGTGAGGTGAAAGTCATTACTCTGAAGTCCAAATTAGTTAGTGATTTCCGGAAGGACTTTCAATTCTACAAAGTCC
GTGAAATTAATAACTATCATCACGCACATGACGCGTACCTGAATGCAGTGGTTGGGACCGCCCTTATCAAGAAATAT
CCTAAGCTGGAGTCGGAGTTTGTCTATGGCGACTATAAGGTATACGATGTTCGCAAAATGATTGCGAAATCTGAGCA
GGAGATCGGTAAGGCAACCGCAAAATATTTCTTTTACTCAAACATTATGAATTTCTTTAAGACAGAAATCACTCTGG
CCAACGGGGAGATTCGCAAACGTCCGTTGATCGAAACAAACGGCGAGACTGGCGAAATTGTTTGGGACAAAGGGCGT
GATTTCGCGACGGTGCGCAAGGTACTGAGCATGCCTCAAGTCAATATTGTTAAGAAAACCGAAGTGCAGACGGGCGG
GTTTTCCAAGGAAAGCATCTTACCCAAACGTAATTCAGATAAACTTATTGCACGCAAAAAGGACTGGGATCCGAAAA
AGTATGGAGGCTTCGACAGTCCAACCGTAGCCTACTCTGTTCTCGTTGTAGCGAAAGTAGAAAAGGGTAAATCCAAG
AAACTGAAATCTGTCAAGGAGTTGCTTGGAATCACCATTATGGAGCGTAGCTCCTTCGAGAAGAACCCGATTGACTT
TCTGGAAGCCAAAGGATATAAAGAGGTCAAGAAAGATCTTATCATTAAGCTGCCTAAGTATTCACTCTTCGAGCTGG
AAAATGGTCGTAAACGCATGCTCGCTTCTGCCGGCGAGTTGCAGAAGGGCAATGAATTAGCACTTCCATCAAAGTAC
GTTAACTTCCTGTATTTGGCCAGCCATTACGAGAAACTGAAGGGGTCTCCAGAGGACAACGAACAGAAACAATTATT
TGTAGAGCAGCACAAGCATTATCTTGATGAAATCATTGAGCAAATTTCCGAATTCAGTAAACGCGTAATCCTGGCCG
ATGCAAACCTCGACAAGGTGCTGAGCGCTTACAATAAGCATCGCGACAAACCTATCCGTGAGCAGGCTGAAAATATC
ATTCACCTGTTCACATTAACGAACCTGGGCGCTCCGGCCGCTTTTAAATATTTCGACACGACAATCGACCGTAAGCG
CTATACCAGTACGAAAGAAGTGTTGGATGCGACCCTTATTCACCAGTCAATTACAGGATTATATGAGACCCGTATCG
ACCTTAGCCAATTAGGTGGGGATGCGCCCGCTCCTGCGCCAGCTCCTGCACCTGCGATGGTTAGCAAAGGTGAAGAA
CTGTTTACCGGCGTTGTGCCGATTCTGGTGGAACTGGATGGTGATGTGAATGGCCATAAATTTAGCGTTagcGGCGA
AGGCGAAGGTGATGCGACCtatGGTAAACTGACCCTGAAATTTATTTGCACCACCGGTAAACTGCCGGTTCCGTGGC
CGACCCTGGTGACCACCCTGACCTATGGCGTTCAGTGCTTTAGCCGCTATCCGGATCATATGAAAcagCATGATTTC
TTTAAAAGCGCGATGCCGGAAGGCTATGTGCAGGAACGTACCATTtttTTCAAAGATGATGGCaacTATAAAACCCG
TGCGGAAGTTAAATTTGAAGGCGATACCCTGGTGAACCGCATTGAACTGAAAGGTATTGATTTTAAAGAAGATGGCA
ACATTCTGGGTCATAAACTGGAATATAATtacAACAGCCATAATGTGTATATTatgGCCGATAAACAGAAAAATGGC
ATCAAAgtgAACTTTAAAATCCGTCACAACattGAAGATGGTAGCGTGCAGCTGGCGGATCATTATCAGCAGAATAC
CCCGATTGGTGATGGCCCGGTGCTGCTGCCGGATAATCATTATCTGAGCACCCAGAGCgcgCTGAGCAAAGATCCGA
ATGAAAAACGTGATCATATGGTGCTGCTGGAATTTGTTACCGCCGCGGGCATTACCctgGGTATGGATGAACTGTAT
AAA
(Cas9-APAPAPAPAPAPA(SEQ ID NO: 15)-eGFP chimera DNA sequence)
SEQ ID NO: 359
ATGGACAAAAAGTACTCTATTGGCCTGGATATCGGGACCAACAGCGTCGGGTGGGCTGTTATCACCGACGAGTATAA
AGTACCTTCGAAAAAGTTCAAAGTGCTGGGCAACACCGATCGCCATTCAATCAAAAAGAACTTGATTGGTGCGCTGT
TGTTTGACTCCGGGGAAACCGCCGAGGCGACTCGCCTTAAACGTACAGCACGTCGCCGGTACACTCGGCGTAAGAAT
CGCATTTGCTATTTGCAGGAAATCTTTAGCAACGAGATGGCAAAAGTCGATGACTCGTTTTTCCACCGCCTCGAGGA
AAGCTTTCTGGTGGAGGAAGACAAAAAGCATGAGCGTCACCCGATCTTCGGCAACATTGTCGATGAAGTAGCGTATC
ATGAAAAATACCCAACCATTTACCACTTACGCAAAAAGCTGGTGGACAGCACTGACAAAGCTGATTTGCGCCTTATC
TATTTAGCCCTGGCACATATGATTAAGTTTCGTGGTCACTTCCTGATCGAAGGAGACTTAAATCCCGACAACAGTGA
TGTTGATAAATTGTTTATTCAGCTTGTCCAAACTTACAATCAACTGTTCGAGGAAAACCCGATCAATGCCTCCGGTG
TGGATGCAAAAGCCATTTTAAGTGCACGCCTTAGCAAGTCCCGTCGCTTAGAAAACCTTATCGCGCAGCTGCCCGGC
GAGAAAAAGAATGGTTTGTTTGGGAACCTTATTGCCTTGAGCTTAGGCCTCACCCCGAATTTCAAAAGTAATTTCGA
TCTTGCAGAAGACGCCAAATTACAACTGTCGAAGGATACTTATGATGACGATCTCGATAATCTGTTAGCGCAGATTG
GTGACCAATACGCCGATCTTTTTCTGGCGGCTAAAAATCTGAGCGACGCCATCTTGCTTTCGGATATTCTCCGCGTT
AACACCGAAATCACGAAAGCGCCTCTTAGTGCCAGCATGATTAAACGTTATGATGAACACCACCAGGACCTGACCTT
ACTCAAAGCGTTGGTTCGCCAGCAACTGCCAGAGAAGTACAAAGAAATCTTCTTTGATCAGTCAAAGAATGGTTATG
CCGGCTATATTGACGGGGGTGCAAGCCAAGAGGAATTCTACAAATTTATCAAGCCTATTCTGGAGAAAATGGATGGC
ACCGAAGAGTTATTGGTGAAGCTTAACCGTGAAGACCTCCTGCGGAAACAGCGCACATTCGATAATGGTTCGATCCC
ACACCAAATCCATTTGGGGGAGTTACACGCTATTTTGCGTCGCCAGGAAGACTTTTACCCTTTCCTGAAGGATAACC
GGGAGAAAATTGAGAAGATCCTTACCTTTCGTATTCCGTATTACGTAGGCCCCTTAGCACGGGGTAATAGCCGTTTC
GCGTGGATGACACGGAAGTCGGAAGAGACGATCACCCCGTGGAACTTCGAAGAGGTAGTCGACAAGGGCGCATCAGC
GCAGTCTTTTATTGAACGTATGACGAATTTCGATAAAAACTTGCCCAATGAGAAGGTGCTTCCGAAACATTCCTTGT
TATATGAATATTTTACAGTTTACAACGAGCTGACCAAGGTTAAATACGTGACGGAAGGAATGCGCAAGCCCGCTTTT
CTTAGCGGTGAGCAAAAAAAGGCGATCGTCGACCTGTTATTCAAAACGAATCGTAAGGTGACTGTAAAGCAACTCAA
AGAAGATTACTTCAAAAAGATTGAGTGCTTCGACAGCGTCGAAATCTCTGGGGTAGAGGATCGGTTTAACGCAAGTT
TAGGTACCTACCATGACCTGCTTAAAATCATTAAGGATAAAGACTTCTTAGATAATGAAGAGAACGAAGATATTCTC
GAGGACATCGTCTTGACGTTAACCTTATTTGAGGATCGTGAAATGATTGAGGAACGCCTCAAAACTTATGCCCACCT
GTTCGACGATAAGGTGATGAAGCAGCTGAAACGTCGGCGCTACACAGGATGGGGCCGCTTGAGTCGCAAACTTATTA
ACGGAATCCGTGACAAGCAATCCGGCAAAACGATTCTGGATTTCTTGAAGTCGGACGGATTTGCTAATCGCAACTTC
ATGCAGTTGATCCATGATGACTCCCTGACTTTTAAAGAGGATATTCAAAAGGCGCAGGTTAGTGGTCAAGGCGACAG
CTTACACGAACACATCGCAAATTTGGCTGGTTCGCCGGCCATTAAAAAGGGGATCCTCCAGACCGTGAAAGTTGTAG
ATGAGCTTGTTAAGGTCATGGGTCGTCATAAGCCCGAAAACATCGTGATTGAAATGGCGCGGGAGAATCAAACGACC
CAGAAAGGACAAAAGAATAGCCGTGAACGGATGAAGCGGATCGAGGAAGGCATTAAAGAGCTGGGGTCTCAAATCTT
GAAGGAACACCCTGTGGAGAACACTCAGCTCCAAAATGAAAAACTTTACCTGTACTATTTGCAGAACGGACGCGATA
TGTACGTGGACCAAGAGTTGGATATTAATCGGCTGAGTGACTACGACGTTGATCATATCGTCCCGCAGAGCTTCCTC
AAAGACGATTCTATTGACAATAAGGTACTGACGCGCTCTGATAAAAACCGTGGTAAGTCGGACAACGTGCCCTCCGA
AGAGGTTGTGAAAAAGATGAAAAATTATTGGCGCCAGCTTTTAAACGCGAAGCTGATCACACAACGTAAATTCGATA
ATTTGACCAAGGCTGAACGGGGTGGCCTGAGCGAGTTAGATAAGGCAGGATTTATTAAACGCCAGTTAGTGGAGACT
CGTCAAATCACCAAACATGTCGCGCAGATTTTGGACAGCCGGATGAACACCAAGTACGATGAAAATGACAAACTGAT
CCGTGAGGTGAAAGTCATTACTCTGAAGTCCAAATTAGTTAGTGATTTCCGGAAGGACTTTCAATTCTACAAAGTCC
GTGAAATTAATAACTATCATCACGCACATGACGCGTACCTGAATGCAGTGGTTGGGACCGCCCTTATCAAGAAATAT
CCTAAGCTGGAGTCGGAGTTTGTCTATGGCGACTATAAGGTATACGATGTTCGCAAAATGATTGCGAAATCTGAGCA
GGAGATCGGTAAGGCAACCGCAAAATATTTCTTTTACTCAAACATTATGAATTTCTTTAAGACAGAAATCACTCTGG
CCAACGGGGAGATTCGCAAACGTCCGTTGATCGAAACAAACGGCGAGACTGGCGAAATTGTTTGGGACAAAGGGCGT
GATTTCGCGACGGTGCGCAAGGTACTGAGCATGCCTCAAGTCAATATTGTTAAGAAAACCGAAGTGCAGACGGGCGG
GTTTTCCAAGGAAAGCATCTTACCCAAACGTAATTCAGATAAACTTATTGCACGCAAAAAGGACTGGGATCCGAAAA
AGTATGGAGGCTTCGACAGTCCAACCGTAGCCTACTCTGTTCTCGTTGTAGCGAAAGTAGAAAAGGGTAAATCCAAG
AAACTGAAATCTGTCAAGGAGTTGCTTGGAATCACCATTATGGAGCGTAGCTCCTTCGAGAAGAACCCGATTGACTT
TCTGGAAGCCAAAGGATATAAAGAGGTCAAGAAAGATCTTATCATTAAGCTGCCTAAGTATTCACTCTTCGAGCTGG
AAAATGGTCGTAAACGCATGCTCGCTTCTGCCGGCGAGTTGCAGAAGGGCAATGAATTAGCACTTCCATCAAAGTAC
GTTAACTTCCTGTATTTGGCCAGCCATTACGAGAAACTGAAGGGGTCTCCAGAGGACAACGAACAGAAACAATTATT
TGTAGAGCAGCACAAGCATTATCTTGATGAAATCATTGAGCAAATTTCCGAATTCAGTAAACGCGTAATCCTGGCCG
ATGCAAACCTCGACAAGGTGCTGAGCGCTTACAATAAGCATCGCGACAAACCTATCCGTGAGCAGGCTGAAAATATC
ATTCACCTGTTCACATTAACGAACCTGGGCGCTCCGGCCGCTTTTAAATATTTCGACACGACAATCGACCGTAAGCG
CTATACCAGTACGAAAGAAGTGTTGGATGCGACCCTTATTCACCAGTCAATTACAGGATTATATGAGACCCGTATCG
ACCTTAGCCAATTAGGTGGGGATGCGCCAGCGCCTGCTCCTGCACCCGCTCCAGCACCTGCGATGGTTAGCAAAGGT
GAAGAACTGTTTACCGGCGTTGTGCCGATTCTGGTGGAACTGGATGGTGATGTGAATGGCCATAAATTTAGCGTTag
cGGCGAAGGCGAAGGTGATGCGACCtatGGTAAACTGACCCTGAAATTTATTTGCACCACCGGTAAACTGCCGGTTC
CGTGGCCGACCCTGGTGACCACCCTGACCTATGGCGTTCAGTGCTTTAGCCGCTATCCGGATCATATGAAAcagCAT
GATTTCTTTAAAAGCGCGATGCCGGAAGGCTATGTGCAGGAACGTACCATTtttTTCAAAGATGATGGCaacTATAA
AACCCGTGCGGAAGTTAAATTTGAAGGCGATACCCTGGTGAACCGCATTGAACTGAAAGGTATTGATTTTAAAGAAG
ATGGCAACATTCTGGGTCATAAACTGGAATATAATtacAACAGCCATAATGTGTATATTatgGCCGATAAACAGAAA
AATGGCATCAAAgtgAACTTTAAAATCCGTCACAACattGAAGATGGTAGCGTGCAGCTGGCGGATCATTATCAGCA
GAATACCCCGATTGGTGATGGCCCGGTGCTGCTGCCGGATAATCATTATCTGAGCACCCAGAGCgcgCTGAGCAAAG
ATCCGAATGAAAAACGTGATCATATGGTGCTGCTGGAATTTGTTACCGCCGCGGGCATTACCctgGGTATGGATGAA
CTGTATAAA
(Cas9-APAPAPAPAPAPAPA(SEQ ID NO: 16)-eGFP chimera DNA sequence)
SEQ ID NO: 360
ATGGACAAAAAGTACTCTATTGGCCTGGATATCGGGACCAACAGCGTCGGGTGGGCTGTTATCACCGACGAGTATAA
AGTACCTTCGAAAAAGTTCAAAGTGCTGGGCAACACCGATCGCCATTCAATCAAAAAGAACTTGATTGGTGCGCTGT
TGTTTGACTCCGGGGAAACCGCCGAGGCGACTCGCCTTAAACGTACAGCACGTCGCCGGTACACTCGGCGTAAGAAT
CGCATTTGCTATTTGCAGGAAATCTTTAGCAACGAGATGGCAAAAGTCGATGACTCGTTTTTCCACCGCCTCGAGGA
AAGCTTTCTGGTGGAGGAAGACAAAAAGCATGAGCGTCACCCGATCTTCGGCAACATTGTCGATGAAGTAGCGTATC
ATGAAAAATACCCAACCATTTACCACTTACGCAAAAAGCTGGTGGACAGCACTGACAAAGCTGATTTGCGCCTTATC
TATTTAGCCCTGGCACATATGATTAAGTTTCGTGGTCACTTCCTGATCGAAGGAGACTTAAATCCCGACAACAGTGA
TGTTGATAAATTGTTTATTCAGCTTGTCCAAACTTACAATCAACTGTTCGAGGAAAACCCGATCAATGCCTCCGGTG
TGGATGCAAAAGCCATTTTAAGTGCACGCCTTAGCAAGTCCCGTCGCTTAGAAAACCTTATCGCGCAGCTGCCCGGC
GAGAAAAAGAATGGTTTGTTTGGGAACCTTATTGCCTTGAGCTTAGGCCTCACCCCGAATTTCAAAAGTAATTTCGA
TCTTGCAGAAGACGCCAAATTACAACTGTCGAAGGATACTTATGATGACGATCTCGATAATCTGTTAGCGCAGATTG
GTGACCAATACGCCGATCTTTTTCTGGCGGCTAAAAATCTGAGCGACGCCATCTTGCTTTCGGATATTCTCCGCGTT
AACACCGAAATCACGAAAGCGCCTCTTAGTGCCAGCATGATTAAACGTTATGATGAACACCACCAGGACCTGACCTT
ACTCAAAGCGTTGGTTCGCCAGCAACTGCCAGAGAAGTACAAAGAAATCTTCTTTGATCAGTCAAAGAATGGTTATG
CCGGCTATATTGACGGGGGTGCAAGCCAAGAGGAATTCTACAAATTTATCAAGCCTATTCTGGAGAAAATGGATGGC
ACCGAAGAGTTATTGGTGAAGCTTAACCGTGAAGACCTCCTGCGGAAACAGCGCACATTCGATAATGGTTCGATCCC
ACACCAAATCCATTTGGGGGAGTTACACGCTATTTTGCGTCGCCAGGAAGACTTTTACCCTTTCCTGAAGGATAACC
GGGAGAAAATTGAGAAGATCCTTACCTTTCGTATTCCGTATTACGTAGGCCCCTTAGCACGGGGTAATAGCCGTTTC
GCGTGGATGACACGGAAGTCGGAAGAGACGATCACCCCGTGGAACTTCGAAGAGGTAGTCGACAAGGGCGCATCAGC
GCAGTCTTTTATTGAACGTATGACGAATTTCGATAAAAACTTGCCCAATGAGAAGGTGCTTCCGAAACATTCCTTGT
TATATGAATATTTTACAGTTTACAACGAGCTGACCAAGGTTAAATACGTGACGGAAGGAATGCGCAAGCCCGCTTTT
CTTAGCGGTGAGCAAAAAAAGGCGATCGTCGACCTGTTATTCAAAACGAATCGTAAGGTGACTGTAAAGCAACTCAA
AGAAGATTACTTCAAAAAGATTGAGTGCTTCGACAGCGTCGAAATCTCTGGGGTAGAGGATCGGTTTAACGCAAGTT
TAGGTACCTACCATGACCTGCTTAAAATCATTAAGGATAAAGACTTCTTAGATAATGAAGAGAACGAAGATATTCTC
GAGGACATCGTCTTGACGTTAACCTTATTTGAGGATCGTGAAATGATTGAGGAACGCCTCAAAACTTATGCCCACCT
GTTCGACGATAAGGTGATGAAGCAGCTGAAACGTCGGCGCTACACAGGATGGGGCCGCTTGAGTCGCAAACTTATTA
ACGGAATCCGTGACAAGCAATCCGGCAAAACGATTCTGGATTTCTTGAAGTCGGACGGATTTGCTAATCGCAACTTC
ATGCAGTTGATCCATGATGACTCCCTGACTTTTAAAGAGGATATTCAAAAGGCGCAGGTTAGTGGTCAAGGCGACAG
CTTACACGAACACATCGCAAATTTGGCTGGTTCGCCGGCCATTAAAAAGGGGATCCTCCAGACCGTGAAAGTTGTAG
ATGAGCTTGTTAAGGTCATGGGTCGTCATAAGCCCGAAAACATCGTGATTGAAATGGCGCGGGAGAATCAAACGACC
CAGAAAGGACAAAAGAATAGCCGTGAACGGATGAAGCGGATCGAGGAAGGCATTAAAGAGCTGGGGTCTCAAATCTT
GAAGGAACACCCTGTGGAGAACACTCAGCTCCAAAATGAAAAACTTTACCTGTACTATTTGCAGAACGGACGCGATA
TGTACGTGGACCAAGAGTTGGATATTAATCGGCTGAGTGACTACGACGTTGATCATATCGTCCCGCAGAGCTTCCTC
AAAGACGATTCTATTGACAATAAGGTACTGACGCGCTCTGATAAAAACCGTGGTAAGTCGGACAACGTGCCCTCCGA
AGAGGTTGTGAAAAAGATGAAAAATTATTGGCGCCAGCTTTTAAACGCGAAGCTGATCACACAACGTAAATTCGATA
ATTTGACCAAGGCTGAACGGGGTGGCCTGAGCGAGTTAGATAAGGCAGGATTTATTAAACGCCAGTTAGTGGAGACT
CGTCAAATCACCAAACATGTCGCGCAGATTTTGGACAGCCGGATGAACACCAAGTACGATGAAAATGACAAACTGAT
CCGTGAGGTGAAAGTCATTACTCTGAAGTCCAAATTAGTTAGTGATTTCCGGAAGGACTTTCAATTCTACAAAGTCC
GTGAAATTAATAACTATCATCACGCACATGACGCGTACCTGAATGCAGTGGTTGGGACCGCCCTTATCAAGAAATAT
CCTAAGCTGGAGTCGGAGTTTGTCTATGGCGACTATAAGGTATACGATGTTCGCAAAATGATTGCGAAATCTGAGCA
GGAGATCGGTAAGGCAACCGCAAAATATTTCTTTTACTCAAACATTATGAATTTCTTTAAGACAGAAATCACTCTGG
CCAACGGGGAGATTCGCAAACGTCCGTTGATCGAAACAAACGGCGAGACTGGCGAAATTGTTTGGGACAAAGGGCGT
GATTTCGCGACGGTGCGCAAGGTACTGAGCATGCCTCAAGTCAATATTGTTAAGAAAACCGAAGTGCAGACGGGCGG
GTTTTCCAAGGAAAGCATCTTACCCAAACGTAATTCAGATAAACTTATTGCACGCAAAAAGGACTGGGATCCGAAAA
AGTATGGAGGCTTCGACAGTCCAACCGTAGCCTACTCTGTTCTCGTTGTAGCGAAAGTAGAAAAGGGTAAATCCAAG
AAACTGAAATCTGTCAAGGAGTTGCTTGGAATCACCATTATGGAGCGTAGCTCCTTCGAGAAGAACCCGATTGACTT
TCTGGAAGCCAAAGGATATAAAGAGGTCAAGAAAGATCTTATCATTAAGCTGCCTAAGTATTCACTCTTCGAGCTGG
AAAATGGTCGTAAACGCATGCTCGCTTCTGCCGGCGAGTTGCAGAAGGGCAATGAATTAGCACTTCCATCAAAGTAC
GTTAACTTCCTGTATTTGGCCAGCCATTACGAGAAACTGAAGGGGTCTCCAGAGGACAACGAACAGAAACAATTATT
TGTAGAGCAGCACAAGCATTATCTTGATGAAATCATTGAGCAAATTTCCGAATTCAGTAAACGCGTAATCCTGGCCG
ATGCAAACCTCGACAAGGTGCTGAGCGCTTACAATAAGCATCGCGACAAACCTATCCGTGAGCAGGCTGAAAATATC
ATTCACCTGTTCACATTAACGAACCTGGGCGCTCCGGCCGCTTTTAAATATTTCGACACGACAATCGACCGTAAGCG
CTATACCAGTACGAAAGAAGTGTTGGATGCGACCCTTATTCACCAGTCAATTACAGGATTATATGAGACCCGTATCG
ACCTTAGCCAATTAGGTGGGGATGCGCCAGCGCCTGCTCCTGCACCCGCTCCAGCTCCTGCCCCAGCGATGGTTAGC
AAAGGTGAAGAACTGTTTACCGGCGTTGTGCCGATTCTGGTGGAACTGGATGGTGATGTGAATGGCCATAAATTTAG
CGTTagcGGCGAAGGCGAAGGTGATGCGACCtatGGTAAACTGACCCTGAAATTTATTTGCACCACCGGTAAACTGC
CGGTTCCGTGGCCGACCCTGGTGACCACCCTGACCTATGGCGTTCAGTGCTTTAGCCGCTATCCGGATCATATGAAA
cagCATGATTTCTTTAAAAGCGCGATGCCGGAAGGCTATGTGCAGGAACGTACCATTtttTTCAAAGATGATGGCaa
cTATAAAACCCGTGCGGAAGTTAAATTTGAAGGCGATACCCTGGTGAACCGCATTGAACTGAAAGGTATTGATTTTA
AAGAAGATGGCAACATTCTGGGTCATAAACTGGAATATAATtacAACAGCCATAATGTGTATATTatgGCCGATAAA
CAGAAAAATGGCATCAAAgtgAACTTTAAAATCCGTCACAACattGAAGATGGTAGCGTGCAGCTGGCGGATCATTA
TCAGCAGAATACCCCGATTGGTGATGGCCCGGTGCTGCTGCCGGATAATCATTATCTGAGCACCCAGAGCgcgCTGA
GCAAAGATCCGAATGAAAAACGTGATCATATGGTGCTGCTGGAATTTGTTACCGCCGCGGGCATTACCctgGGTATG
GATGAACTGTATAAA
(Cas9-APAPAPAPAPAPAPAPA(SEQ ID NO: 17)-eGFP chimera DNA sequence)
SEQ ID NO: 361
ATGGACAAAAAGTACTCTATTGGCCTGGATATCGGGACCAACAGCGTCGGGTGGGCTGTTATCACCGACGAGTATAA
AGTACCTTCGAAAAAGTTCAAAGTGCTGGGCAACACCGATCGCCATTCAATCAAAAAGAACTTGATTGGTGCGCTGT
TGTTTGACTCCGGGGAAACCGCCGAGGCGACTCGCCTTAAACGTACAGCACGTCGCCGGTACACTCGGCGTAAGAAT
CGCATTTGCTATTTGCAGGAAATCTTTAGCAACGAGATGGCAAAAGTCGATGACTCGTTTTTCCACCGCCTCGAGGA
AAGCTTTCTGGTGGAGGAAGACAAAAAGCATGAGCGTCACCCGATCTTCGGCAACATTGTCGATGAAGTAGCGTATC
ATGAAAAATACCCAACCATTTACCACTTACGCAAAAAGCTGGTGGACAGCACTGACAAAGCTGATTTGCGCCTTATC
TATTTAGCCCTGGCACATATGATTAAGTTTCGTGGTCACTTCCTGATCGAAGGAGACTTAAATCCCGACAACAGTGA
TGTTGATAAATTGTTTATTCAGCTTGTCCAAACTTACAATCAACTGTTCGAGGAAAACCCGATCAATGCCTCCGGTG
TGGATGCAAAAGCCATTTTAAGTGCACGCCTTAGCAAGTCCCGTCGCTTAGAAAACCTTATCGCGCAGCTGCCCGGC
GAGAAAAAGAATGGTTTGTTTGGGAACCTTATTGCCTTGAGCTTAGGCCTCACCCCGAATTTCAAAAGTAATTTCGA
TCTTGCAGAAGACGCCAAATTACAACTGTCGAAGGATACTTATGATGACGATCTCGATAATCTGTTAGCGCAGATTG
GTGACCAATACGCCGATCTTTTTCTGGCGGCTAAAAATCTGAGCGACGCCATCTTGCTTTCGGATATTCTCCGCGTT
AACACCGAAATCACGAAAGCGCCTCTTAGTGCCAGCATGATTAAACGTTATGATGAACACCACCAGGACCTGACCTT
ACTCAAAGCGTTGGTTCGCCAGCAACTGCCAGAGAAGTACAAAGAAATCTTCTTTGATCAGTCAAAGAATGGTTATG
CCGGCTATATTGACGGGGGTGCAAGCCAAGAGGAATTCTACAAATTTATCAAGCCTATTCTGGAGAAAATGGATGGC
ACCGAAGAGTTATTGGTGAAGCTTAACCGTGAAGACCTCCTGCGGAAACAGCGCACATTCGATAATGGTTCGATCCC
ACACCAAATCCATTTGGGGGAGTTACACGCTATTTTGCGTCGCCAGGAAGACTTTTACCCTTTCCTGAAGGATAACC
GGGAGAAAATTGAGAAGATCCTTACCTTTCGTATTCCGTATTACGTAGGCCCCTTAGCACGGGGTAATAGCCGTTTC
GCGTGGATGACACGGAAGTCGGAAGAGACGATCACCCCGTGGAACTTCGAAGAGGTAGTCGACAAGGGCGCATCAGC
GCAGTCTTTTATTGAACGTATGACGAATTTCGATAAAAACTTGCCCAATGAGAAGGTGCTTCCGAAACATTCCTTGT
TATATGAATATTTTACAGTTTACAACGAGCTGACCAAGGTTAAATACGTGACGGAAGGAATGCGCAAGCCCGCTTTT
CTTAGCGGTGAGCAAAAAAAGGCGATCGTCGACCTGTTATTCAAAACGAATCGTAAGGTGACTGTAAAGCAACTCAA
AGAAGATTACTTCAAAAAGATTGAGTGCTTCGACAGCGTCGAAATCTCTGGGGTAGAGGATCGGTTTAACGCAAGTT
TAGGTACCTACCATGACCTGCTTAAAATCATTAAGGATAAAGACTTCTTAGATAATGAAGAGAACGAAGATATTCTC
GAGGACATCGTCTTGACGTTAACCTTATTTGAGGATCGTGAAATGATTGAGGAACGCCTCAAAACTTATGCCCACCT
GTTCGACGATAAGGTGATGAAGCAGCTGAAACGTCGGCGCTACACAGGATGGGGCCGCTTGAGTCGCAAACTTATTA
ACGGAATCCGTGACAAGCAATCCGGCAAAACGATTCTGGATTTCTTGAAGTCGGACGGATTTGCTAATCGCAACTTC
ATGCAGTTGATCCATGATGACTCCCTGACTTTTAAAGAGGATATTCAAAAGGCGCAGGTTAGTGGTCAAGGCGACAG
CTTACACGAACACATCGCAAATTTGGCTGGTTCGCCGGCCATTAAAAAGGGGATCCTCCAGACCGTGAAAGTTGTAG
ATGAGCTTGTTAAGGTCATGGGTCGTCATAAGCCCGAAAACATCGTGATTGAAATGGCGCGGGAGAATCAAACGACC
CAGAAAGGACAAAAGAATAGCCGTGAACGGATGAAGCGGATCGAGGAAGGCATTAAAGAGCTGGGGTCTCAAATCTT
GAAGGAACACCCTGTGGAGAACACTCAGCTCCAAAATGAAAAACTTTACCTGTACTATTTGCAGAACGGACGCGATA
TGTACGTGGACCAAGAGTTGGATATTAATCGGCTGAGTGACTACGACGTTGATCATATCGTCCCGCAGAGCTTCCTC
AAAGACGATTCTATTGACAATAAGGTACTGACGCGCTCTGATAAAAACCGTGGTAAGTCGGACAACGTGCCCTCCGA
AGAGGTTGTGAAAAAGATGAAAAATTATTGGCGCCAGCTTTTAAACGCGAAGCTGATCACACAACGTAAATTCGATA
ATTTGACCAAGGCTGAACGGGGTGGCCTGAGCGAGTTAGATAAGGCAGGATTTATTAAACGCCAGTTAGTGGAGACT
CGTCAAATCACCAAACATGTCGCGCAGATTTTGGACAGCCGGATGAACACCAAGTACGATGAAAATGACAAACTGAT
CCGTGAGGTGAAAGTCATTACTCTGAAGTCCAAATTAGTTAGTGATTTCCGGAAGGACTTTCAATTCTACAAAGTCC
GTGAAATTAATAACTATCATCACGCACATGACGCGTACCTGAATGCAGTGGTTGGGACCGCCCTTATCAAGAAATAT
CCTAAGCTGGAGTCGGAGTTTGTCTATGGCGACTATAAGGTATACGATGTTCGCAAAATGATTGCGAAATCTGAGCA
GGAGATCGGTAAGGCAACCGCAAAATATTTCTTTTACTCAAACATTATGAATTTCTTTAAGACAGAAATCACTCTGG
CCAACGGGGAGATTCGCAAACGTCCGTTGATCGAAACAAACGGCGAGACTGGCGAAATTGTTTGGGACAAAGGGCGT
GATTTCGCGACGGTGCGCAAGGTACTGAGCATGCCTCAAGTCAATATTGTTAAGAAAACCGAAGTGCAGACGGGCGG
GTTTTCCAAGGAAAGCATCTTACCCAAACGTAATTCAGATAAACTTATTGCACGCAAAAAGGACTGGGATCCGAAAA
AGTATGGAGGCTTCGACAGTCCAACCGTAGCCTACTCTGTTCTCGTTGTAGCGAAAGTAGAAAAGGGTAAATCCAAG
AAACTGAAATCTGTCAAGGAGTTGCTTGGAATCACCATTATGGAGCGTAGCTCCTTCGAGAAGAACCCGATTGACTT
TCTGGAAGCCAAAGGATATAAAGAGGTCAAGAAAGATCTTATCATTAAGCTGCCTAAGTATTCACTCTTCGAGCTGG
AAAATGGTCGTAAACGCATGCTCGCTTCTGCCGGCGAGTTGCAGAAGGGCAATGAATTAGCACTTCCATCAAAGTAC
GTTAACTTCCTGTATTTGGCCAGCCATTACGAGAAACTGAAGGGGTCTCCAGAGGACAACGAACAGAAACAATTATT
TGTAGAGCAGCACAAGCATTATCTTGATGAAATCATTGAGCAAATTTCCGAATTCAGTAAACGCGTAATCCTGGCCG
ATGCAAACCTCGACAAGGTGCTGAGCGCTTACAATAAGCATCGCGACAAACCTATCCGTGAGCAGGCTGAAAATATC
ATTCACCTGTTCACATTAACGAACCTGGGCGCTCCGGCCGCTTTTAAATATTTCGACACGACAATCGACCGTAAGCG
CTATACCAGTACGAAAGAAGTGTTGGATGCGACCCTTATTCACCAGTCAATTACAGGATTATATGAGACCCGTATCG
ACCTTAGCCAATTAGGTGGGGATGCGCCAGCGCCTGCTCCTGCACCCGCTCCAGCGCCAGCTCCTGCACCTGCGATG
GTTAGCAAAGGTGAAGAACTGTTTACCGGCGTTGTGCCGATTCTGGTGGAACTGGATGGTGATGTGAATGGCCATAA
ATTTAGCGTTagcGGCGAAGGCGAAGGTGATGCGACCtatGGTAAACTGACCCTGAAATTTATTTGCACCACCGGTA
AACTGCCGGTTCCGTGGCCGACCCTGGTGACCACCCTGACCTATGGCGTTCAGTGCTTTAGCCGCTATCCGGATCAT
ATGAAAcagCATGATTTCTTTAAAAGCGCGATGCCGGAAGGCTATGTGCAGGAACGTACCATTtttTTCAAAGATGA
TGGCaacTATAAAACCCGTGCGGAAGTTAAATTTGAAGGCGATACCCTGGTGAACCGCATTGAACTGAAAGGTATTG
ATTTTAAAGAAGATGGCAACATTCTGGGTCATAAACTGGAATATAATtacAACAGCCATAATGTGTATATTatgGCC
GATAAACAGAAAAATGGCATCAAAgtgAACTTTAAAATCCGTCACAACattGAAGATGGTAGCGTGCAGCTGGCGGA
TCATTATCAGCAGAATACCCCGATTGGTGATGGCCCGGTGCTGCTGCCGGATAATCATTATCTGAGCACCCAGAGCg
cgCTGAGCAAAGATCCGAATGAAAAACGTGATCATATGGTGCTGCTGGAATTTGTTACCGCCGCGGGCATTACCctg
GGTATGGATGAACTGTATAAA
(Cas9-APAPAPAPAPAPAPAPAPA(SEQ ID NO: 18)-eGFP chimera DNA sequence)
SEQ ID NO: 362
ATGGACAAAAAGTACTCTATTGGCCTGGATATCGGGACCAACAGCGTCGGGTGGGCTGTTATCACCGACGAGTATAA
AGTACCTTCGAAAAAGTTCAAAGTGCTGGGCAACACCGATCGCCATTCAATCAAAAAGAACTTGATTGGTGCGCTGT
TGTTTGACTCCGGGGAAACCGCCGAGGCGACTCGCCTTAAACGTACAGCACGTCGCCGGTACACTCGGCGTAAGAAT
CGCATTTGCTATTTGCAGGAAATCTTTAGCAACGAGATGGCAAAAGTCGATGACTCGTTTTTCCACCGCCTCGAGGA
AAGCTTTCTGGTGGAGGAAGACAAAAAGCATGAGCGTCACCCGATCTTCGGCAACATTGTCGATGAAGTAGCGTATC
ATGAAAAATACCCAACCATTTACCACTTACGCAAAAAGCTGGTGGACAGCACTGACAAAGCTGATTTGCGCCTTATC
TATTTAGCCCTGGCACATATGATTAAGTTTCGTGGTCACTTCCTGATCGAAGGAGACTTAAATCCCGACAACAGTGA
TGTTGATAAATTGTTTATTCAGCTTGTCCAAACTTACAATCAACTGTTCGAGGAAAACCCGATCAATGCCTCCGGTG
TGGATGCAAAAGCCATTTTAAGTGCACGCCTTAGCAAGTCCCGTCGCTTAGAAAACCTTATCGCGCAGCTGCCCGGC
GAGAAAAAGAATGGTTTGTTTGGGAACCTTATTGCCTTGAGCTTAGGCCTCACCCCGAATTTCAAAAGTAATTTCGA
TCTTGCAGAAGACGCCAAATTACAACTGTCGAAGGATACTTATGATGACGATCTCGATAATCTGTTAGCGCAGATTG
GTGACCAATACGCCGATCTTTTTCTGGCGGCTAAAAATCTGAGCGACGCCATCTTGCTTTCGGATATTCTCCGCGTT
AACACCGAAATCACGAAAGCGCCTCTTAGTGCCAGCATGATTAAACGTTATGATGAACACCACCAGGACCTGACCTT
ACTCAAAGCGTTGGTTCGCCAGCAACTGCCAGAGAAGTACAAAGAAATCTTCTTTGATCAGTCAAAGAATGGTTATG
CCGGCTATATTGACGGGGGTGCAAGCCAAGAGGAATTCTACAAATTTATCAAGCCTATTCTGGAGAAAATGGATGGC
ACCGAAGAGTTATTGGTGAAGCTTAACCGTGAAGACCTCCTGCGGAAACAGCGCACATTCGATAATGGTTCGATCCC
ACACCAAATCCATTTGGGGGAGTTACACGCTATTTTGCGTCGCCAGGAAGACTTTTACCCTTTCCTGAAGGATAACC
GGGAGAAAATTGAGAAGATCCTTACCTTTCGTATTCCGTATTACGTAGGCCCCTTAGCACGGGGTAATAGCCGTTTC
GCGTGGATGACACGGAAGTCGGAAGAGACGATCACCCCGTGGAACTTCGAAGAGGTAGTCGACAAGGGCGCATCAGC
GCAGTCTTTTATTGAACGTATGACGAATTTCGATAAAAACTTGCCCAATGAGAAGGTGCTTCCGAAACATTCCTTGT
TATATGAATATTTTACAGTTTACAACGAGCTGACCAAGGTTAAATACGTGACGGAAGGAATGCGCAAGCCCGCTTTT
CTTAGCGGTGAGCAAAAAAAGGCGATCGTCGACCTGTTATTCAAAACGAATCGTAAGGTGACTGTAAAGCAACTCAA
AGAAGATTACTTCAAAAAGATTGAGTGCTTCGACAGCGTCGAAATCTCTGGGGTAGAGGATCGGTTTAACGCAAGTT
TAGGTACCTACCATGACCTGCTTAAAATCATTAAGGATAAAGACTTCTTAGATAATGAAGAGAACGAAGATATTCTC
GAGGACATCGTCTTGACGTTAACCTTATTTGAGGATCGTGAAATGATTGAGGAACGCCTCAAAACTTATGCCCACCT
GTTCGACGATAAGGTGATGAAGCAGCTGAAACGTCGGCGCTACACAGGATGGGGCCGCTTGAGTCGCAAACTTATTA
ACGGAATCCGTGACAAGCAATCCGGCAAAACGATTCTGGATTTCTTGAAGTCGGACGGATTTGCTAATCGCAACTTC
ATGCAGTTGATCCATGATGACTCCCTGACTTTTAAAGAGGATATTCAAAAGGCGCAGGTTAGTGGTCAAGGCGACAG
CTTACACGAACACATCGCAAATTTGGCTGGTTCGCCGGCCATTAAAAAGGGGATCCTCCAGACCGTGAAAGTTGTAG
ATGAGCTTGTTAAGGTCATGGGTCGTCATAAGCCCGAAAACATCGTGATTGAAATGGCGCGGGAGAATCAAACGACC
CAGAAAGGACAAAAGAATAGCCGTGAACGGATGAAGCGGATCGAGGAAGGCATTAAAGAGCTGGGGTCTCAAATCTT
GAAGGAACACCCTGTGGAGAACACTCAGCTCCAAAATGAAAAACTTTACCTGTACTATTTGCAGAACGGACGCGATA
TGTACGTGGACCAAGAGTTGGATATTAATCGGCTGAGTGACTACGACGTTGATCATATCGTCCCGCAGAGCTTCCTC
AAAGACGATTCTATTGACAATAAGGTACTGACGCGCTCTGATAAAAACCGTGGTAAGTCGGACAACGTGCCCTCCGA
AGAGGTTGTGAAAAAGATGAAAAATTATTGGCGCCAGCTTTTAAACGCGAAGCTGATCACACAACGTAAATTCGATA
ATTTGACCAAGGCTGAACGGGGTGGCCTGAGCGAGTTAGATAAGGCAGGATTTATTAAACGCCAGTTAGTGGAGACT
CGTCAAATCACCAAACATGTCGCGCAGATTTTGGACAGCCGGATGAACACCAAGTACGATGAAAATGACAAACTGAT
CCGTGAGGTGAAAGTCATTACTCTGAAGTCCAAATTAGTTAGTGATTTCCGGAAGGACTTTCAATTCTACAAAGTCC
GTGAAATTAATAACTATCATCACGCACATGACGCGTACCTGAATGCAGTGGTTGGGACCGCCCTTATCAAGAAATAT
CCTAAGCTGGAGTCGGAGTTTGTCTATGGCGACTATAAGGTATACGATGTTCGCAAAATGATTGCGAAATCTGAGCA
GGAGATCGGTAAGGCAACCGCAAAATATTTCTTTTACTCAAACATTATGAATTTCTTTAAGACAGAAATCACTCTGG
CCAACGGGGAGATTCGCAAACGTCCGTTGATCGAAACAAACGGCGAGACTGGCGAAATTGTTTGGGACAAAGGGCGT
GATTTCGCGACGGTGCGCAAGGTACTGAGCATGCCTCAAGTCAATATTGTTAAGAAAACCGAAGTGCAGACGGGCGG
GTTTTCCAAGGAAAGCATCTTACCCAAACGTAATTCAGATAAACTTATTGCACGCAAAAAGGACTGGGATCCGAAAA
AGTATGGAGGCTTCGACAGTCCAACCGTAGCCTACTCTGTTCTCGTTGTAGCGAAAGTAGAAAAGGGTAAATCCAAG
AAACTGAAATCTGTCAAGGAGTTGCTTGGAATCACCATTATGGAGCGTAGCTCCTTCGAGAAGAACCCGATTGACTT
TCTGGAAGCCAAAGGATATAAAGAGGTCAAGAAAGATCTTATCATTAAGCTGCCTAAGTATTCACTCTTCGAGCTGG
AAAATGGTCGTAAACGCATGCTCGCTTCTGCCGGCGAGTTGCAGAAGGGCAATGAATTAGCACTTCCATCAAAGTAC
GTTAACTTCCTGTATTTGGCCAGCCATTACGAGAAACTGAAGGGGTCTCCAGAGGACAACGAACAGAAACAATTATT
TGTAGAGCAGCACAAGCATTATCTTGATGAAATCATTGAGCAAATTTCCGAATTCAGTAAACGCGTAATCCTGGCCG
ATGCAAACCTCGACAAGGTGCTGAGCGCTTACAATAAGCATCGCGACAAACCTATCCGTGAGCAGGCTGAAAATATC
ATTCACCTGTTCACATTAACGAACCTGGGCGCTCCGGCCGCTTTTAAATATTTCGACACGACAATCGACCGTAAGCG
CTATACCAGTACGAAAGAAGTGTTGGATGCGACCCTTATTCACCAGTCAATTACAGGATTATATGAGACCCGTATCG
ACCTTAGCCAATTAGGTGGGGATGCGCCAGCGCCTGCTCCTGCACCCGCTCCAGCTCCTGCGCCAGCTCCTGCACCT
GCGATGGTTAGCAAAGGTGAAGAACTGTTTACCGGCGTTGTGCCGATTCTGGTGGAACTGGATGGTGATGTGAATGG
CCATAAATTTAGCGTTagcGGCGAAGGCGAAGGTGATGCGACCtatGGTAAACTGACCCTGAAATTTATTTGCACCA
CCGGTAAACTGCCGGTTCCGTGGCCGACCCTGGTGACCACCCTGACCTATGGCGTTCAGTGCTTTAGCCGCTATCCG
GATCATATGAAAcagCATGATTTCTTTAAAAGCGCGATGCCGGAAGGCTATGTGCAGGAACGTACCATTtttTTCAA
AGATGATGGCaacTATAAAACCCGTGCGGAAGTTAAATTTGAAGGCGATACCCTGGTGAACCGCATTGAACTGAAAG
GTATTGATTTTAAAGAAGATGGCAACATTCTGGGTCATAAACTGGAATATAATtacAACAGCCATAATGTGTATATT
atgGCCGATAAACAGAAAAATGGCATCAAAgtgAACTTTAAAATCCGTCACAACattGAAGATGGTAGCGTGCAGCT
GGCGGATCATTATCAGCAGAATACCCCGATTGGTGATGGCCCGGTGCTGCTGCCGGATAATCATTATCTGAGCACCC
AGAGCgcgCTGAGCAAAGATCCGAATGAAAAACGTGATCATATGGTGCTGCTGGAATTTGTTACCGCCGCGGGCATT
ACCctgGGTATGGATGAACTGTATAAA
(Cas9-APAPAPAPAPAPAPAPAPAPA(SEQ ID NO: 19)-eGFP chimera DNA sequence)
SEQ ID NO: 363
ATGGACAAAAAGTACTCTATTGGCCTGGATATCGGGACCAACAGCGTCGGGTGGGCTGTTATCACCGACGAGTATAA
AGTACCTTCGAAAAAGTTCAAAGTGCTGGGCAACACCGATCGCCATTCAATCAAAAAGAACTTGATTGGTGCGCTGT
TGTTTGACTCCGGGGAAACCGCCGAGGCGACTCGCCTTAAACGTACAGCACGTCGCCGGTACACTCGGCGTAAGAAT
CGCATTTGCTATTTGCAGGAAATCTTTAGCAACGAGATGGCAAAAGTCGATGACTCGTTTTTCCACCGCCTCGAGGA
AAGCTTTCTGGTGGAGGAAGACAAAAAGCATGAGCGTCACCCGATCTTCGGCAACATTGTCGATGAAGTAGCGTATC
ATGAAAAATACCCAACCATTTACCACTTACGCAAAAAGCTGGTGGACAGCACTGACAAAGCTGATTTGCGCCTTATC
TATTTAGCCCTGGCACATATGATTAAGTTTCGTGGTCACTTCCTGATCGAAGGAGACTTAAATCCCGACAACAGTGA
TGTTGATAAATTGTTTATTCAGCTTGTCCAAACTTACAATCAACTGTTCGAGGAAAACCCGATCAATGCCTCCGGTG
TGGATGCAAAAGCCATTTTAAGTGCACGCCTTAGCAAGTCCCGTCGCTTAGAAAACCTTATCGCGCAGCTGCCCGGC
GAGAAAAAGAATGGTTTGTTTGGGAACCTTATTGCCTTGAGCTTAGGCCTCACCCCGAATTTCAAAAGTAATTTCGA
TCTTGCAGAAGACGCCAAATTACAACTGTCGAAGGATACTTATGATGACGATCTCGATAATCTGTTAGCGCAGATTG
GTGACCAATACGCCGATCTTTTTCTGGCGGCTAAAAATCTGAGCGACGCCATCTTGCTTTCGGATATTCTCCGCGTT
AACACCGAAATCACGAAAGCGCCTCTTAGTGCCAGCATGATTAAACGTTATGATGAACACCACCAGGACCTGACCTT
ACTCAAAGCGTTGGTTCGCCAGCAACTGCCAGAGAAGTACAAAGAAATCTTCTTTGATCAGTCAAAGAATGGTTATG
CCGGCTATATTGACGGGGGTGCAAGCCAAGAGGAATTCTACAAATTTATCAAGCCTATTCTGGAGAAAATGGATGGC
ACCGAAGAGTTATTGGTGAAGCTTAACCGTGAAGACCTCCTGCGGAAACAGCGCACATTCGATAATGGTTCGATCCC
ACACCAAATCCATTTGGGGGAGTTACACGCTATTTTGCGTCGCCAGGAAGACTTTTACCCTTTCCTGAAGGATAACC
GGGAGAAAATTGAGAAGATCCTTACCTTTCGTATTCCGTATTACGTAGGCCCCTTAGCACGGGGTAATAGCCGTTTC
GCGTGGATGACACGGAAGTCGGAAGAGACGATCACCCCGTGGAACTTCGAAGAGGTAGTCGACAAGGGCGCATCAGC
GCAGTCTTTTATTGAACGTATGACGAATTTCGATAAAAACTTGCCCAATGAGAAGGTGCTTCCGAAACATTCCTTGT
TATATGAATATTTTACAGTTTACAACGAGCTGACCAAGGTTAAATACGTGACGGAAGGAATGCGCAAGCCCGCTTTT
CTTAGCGGTGAGCAAAAAAAGGCGATCGTCGACCTGTTATTCAAAACGAATCGTAAGGTGACTGTAAAGCAACTCAA
AGAAGATTACTTCAAAAAGATTGAGTGCTTCGACAGCGTCGAAATCTCTGGGGTAGAGGATCGGTTTAACGCAAGTT
TAGGTACCTACCATGACCTGCTTAAAATCATTAAGGATAAAGACTTCTTAGATAATGAAGAGAACGAAGATATTCTC
GAGGACATCGTCTTGACGTTAACCTTATTTGAGGATCGTGAAATGATTGAGGAACGCCTCAAAACTTATGCCCACCT
GTTCGACGATAAGGTGATGAAGCAGCTGAAACGTCGGCGCTACACAGGATGGGGCCGCTTGAGTCGCAAACTTATTA
ACGGAATCCGTGACAAGCAATCCGGCAAAACGATTCTGGATTTCTTGAAGTCGGACGGATTTGCTAATCGCAACTTC
ATGCAGTTGATCCATGATGACTCCCTGACTTTTAAAGAGGATATTCAAAAGGCGCAGGTTAGTGGTCAAGGCGACAG
CTTACACGAACACATCGCAAATTTGGCTGGTTCGCCGGCCATTAAAAAGGGGATCCTCCAGACCGTGAAAGTTGTAG
ATGAGCTTGTTAAGGTCATGGGTCGTCATAAGCCCGAAAACATCGTGATTGAAATGGCGCGGGAGAATCAAACGACC
CAGAAAGGACAAAAGAATAGCCGTGAACGGATGAAGCGGATCGAGGAAGGCATTAAAGAGCTGGGGTCTCAAATCTT
GAAGGAACACCCTGTGGAGAACACTCAGCTCCAAAATGAAAAACTTTACCTGTACTATTTGCAGAACGGACGCGATA
TGTACGTGGACCAAGAGTTGGATATTAATCGGCTGAGTGACTACGACGTTGATCATATCGTCCCGCAGAGCTTCCTC
AAAGACGATTCTATTGACAATAAGGTACTGACGCGCTCTGATAAAAACCGTGGTAAGTCGGACAACGTGCCCTCCGA
AGAGGTTGTGAAAAAGATGAAAAATTATTGGCGCCAGCTTTTAAACGCGAAGCTGATCACACAACGTAAATTCGATA
ATTTGACCAAGGCTGAACGGGGTGGCCTGAGCGAGTTAGATAAGGCAGGATTTATTAAACGCCAGTTAGTGGAGACT
CGTCAAATCACCAAACATGTCGCGCAGATTTTGGACAGCCGGATGAACACCAAGTACGATGAAAATGACAAACTGAT
CCGTGAGGTGAAAGTCATTACTCTGAAGTCCAAATTAGTTAGTGATTTCCGGAAGGACTTTCAATTCTACAAAGTCC
GTGAAATTAATAACTATCATCACGCACATGACGCGTACCTGAATGCAGTGGTTGGGACCGCCCTTATCAAGAAATAT
CCTAAGCTGGAGTCGGAGTTTGTCTATGGCGACTATAAGGTATACGATGTTCGCAAAATGATTGCGAAATCTGAGCA
GGAGATCGGTAAGGCAACCGCAAAATATTTCTTTTACTCAAACATTATGAATTTCTTTAAGACAGAAATCACTCTGG
CCAACGGGGAGATTCGCAAACGTCCGTTGATCGAAACAAACGGCGAGACTGGCGAAATTGTTTGGGACAAAGGGCGT
GATTTCGCGACGGTGCGCAAGGTACTGAGCATGCCTCAAGTCAATATTGTTAAGAAAACCGAAGTGCAGACGGGCGG
GTTTTCCAAGGAAAGCATCTTACCCAAACGTAATTCAGATAAACTTATTGCACGCAAAAAGGACTGGGATCCGAAAA
AGTATGGAGGCTTCGACAGTCCAACCGTAGCCTACTCTGTTCTCGTTGTAGCGAAAGTAGAAAAGGGTAAATCCAAG
AAACTGAAATCTGTCAAGGAGTTGCTTGGAATCACCATTATGGAGCGTAGCTCCTTCGAGAAGAACCCGATTGACTT
TCTGGAAGCCAAAGGATATAAAGAGGTCAAGAAAGATCTTATCATTAAGCTGCCTAAGTATTCACTCTTCGAGCTGG
AAAATGGTCGTAAACGCATGCTCGCTTCTGCCGGCGAGTTGCAGAAGGGCAATGAATTAGCACTTCCATCAAAGTAC
GTTAACTTCCTGTATTTGGCCAGCCATTACGAGAAACTGAAGGGGTCTCCAGAGGACAACGAACAGAAACAATTATT
TGTAGAGCAGCACAAGCATTATCTTGATGAAATCATTGAGCAAATTTCCGAATTCAGTAAACGCGTAATCCTGGCCG
ATGCAAACCTCGACAAGGTGCTGAGCGCTTACAATAAGCATCGCGACAAACCTATCCGTGAGCAGGCTGAAAATATC
ATTCACCTGTTCACATTAACGAACCTGGGCGCTCCGGCCGCTTTTAAATATTTCGACACGACAATCGACCGTAAGCG
CTATACCAGTACGAAAGAAGTGTTGGATGCGACCCTTATTCACCAGTCAATTACAGGATTATATGAGACCCGTATCG
ACCTTAGCCAATTAGGTGGGGATGCGCCAGCGCCTGCTCCTGCACCCGCTCCAGCTCCTGCTCCTGCGCCAGCTCCT
GCACCTGCGATGGTTAGCAAAGGTGAAGAACTGTTTACCGGCGTTGTGCCGATTCTGGTGGAACTGGATGGTGATGT
GAATGGCCATAAATTTAGCGTTagcGGCGAAGGCGAAGGTGATGCGACCtatGGTAAACTGACCCTGAAATTTATTT
GCACCACCGGTAAACTGCCGGTTCCGTGGCCGACCCTGGTGACCACCCTGACCTATGGCGTTCAGTGCTTTAGCCGC
TATCCGGATCATATGAAAcagCATGATTTCTTTAAAAGCGCGATGCCGGAAGGCTATGTGCAGGAACGTACCATTtt
tTTCAAAGATGATGGCaacTATAAAACCCGTGCGGAAGTTAAATTTGAAGGCGATACCCTGGTGAACCGCATTGAAC
TGAAAGGTATTGATTTTAAAGAAGATGGCAACATTCTGGGTCATAAACTGGAATATAATtacAACAGCCATAATGTG
TATATTatgGCCGATAAACAGAAAAATGGCATCAAAgtgAACTTTAAAATCCGTCACAACattGAAGATGGTAGCGT
GCAGCTGGCGGATCATTATCAGCAGAATACCCCGATTGGTGATGGCCCGGTGCTGCTGCCGGATAATCATTATCTGA
GCACCCAGAGCgcgCTGAGCAAAGATCCGAATGAAAAACGTGATCATATGGTGCTGCTGGAATTTGTTACCGCCGCG
GGCATTACCctgGGTATGGATGAACTGTATAAA
(Cas9-APAPAPAPAPAPAPAPAPAPAPA(SEQ ID NO: 20)-eGFP chimera DNA sequence)
SEQ ID NO: 364
ATGGACAAAAAGTACTCTATTGGCCTGGATATCGGGACCAACAGCGTCGGGTGGGCTGTTATCACCGACGAGTATAA
AGTACCTTCGAAAAAGTTCAAAGTGCTGGGCAACACCGATCGCCATTCAATCAAAAAGAACTTGATTGGTGCGCTGT
TGTTTGACTCCGGGGAAACCGCCGAGGCGACTCGCCTTAAACGTACAGCACGTCGCCGGTACACTCGGCGTAAGAAT
CGCATTTGCTATTTGCAGGAAATCTTTAGCAACGAGATGGCAAAAGTCGATGACTCGTTTTTCCACCGCCTCGAGGA
AAGCTTTCTGGTGGAGGAAGACAAAAAGCATGAGCGTCACCCGATCTTCGGCAACATTGTCGATGAAGTAGCGTATC
ATGAAAAATACCCAACCATTTACCACTTACGCAAAAAGCTGGTGGACAGCACTGACAAAGCTGATTTGCGCCTTATC
TATTTAGCCCTGGCACATATGATTAAGTTTCGTGGTCACTTCCTGATCGAAGGAGACTTAAATCCCGACAACAGTGA
TGTTGATAAATTGTTTATTCAGCTTGTCCAAACTTACAATCAACTGTTCGAGGAAAACCCGATCAATGCCTCCGGTG
TGGATGCAAAAGCCATTTTAAGTGCACGCCTTAGCAAGTCCCGTCGCTTAGAAAACCTTATCGCGCAGCTGCCCGGC
GAGAAAAAGAATGGTTTGTTTGGGAACCTTATTGCCTTGAGCTTAGGCCTCACCCCGAATTTCAAAAGTAATTTCGA
TCTTGCAGAAGACGCCAAATTACAACTGTCGAAGGATACTTATGATGACGATCTCGATAATCTGTTAGCGCAGATTG
GTGACCAATACGCCGATCTTTTTCTGGCGGCTAAAAATCTGAGCGACGCCATCTTGCTTTCGGATATTCTCCGCGTT
AACACCGAAATCACGAAAGCGCCTCTTAGTGCCAGCATGATTAAACGTTATGATGAACACCACCAGGACCTGACCTT
ACTCAAAGCGTTGGTTCGCCAGCAACTGCCAGAGAAGTACAAAGAAATCTTCTTTGATCAGTCAAAGAATGGTTATG
CCGGCTATATTGACGGGGGTGCAAGCCAAGAGGAATTCTACAAATTTATCAAGCCTATTCTGGAGAAAATGGATGGC
ACCGAAGAGTTATTGGTGAAGCTTAACCGTGAAGACCTCCTGCGGAAACAGCGCACATTCGATAATGGTTCGATCCC
ACACCAAATCCATTTGGGGGAGTTACACGCTATTTTGCGTCGCCAGGAAGACTTTTACCCTTTCCTGAAGGATAACC
GGGAGAAAATTGAGAAGATCCTTACCTTTCGTATTCCGTATTACGTAGGCCCCTTAGCACGGGGTAATAGCCGTTTC
GCGTGGATGACACGGAAGTCGGAAGAGACGATCACCCCGTGGAACTTCGAAGAGGTAGTCGACAAGGGCGCATCAGC
GCAGTCTTTTATTGAACGTATGACGAATTTCGATAAAAACTTGCCCAATGAGAAGGTGCTTCCGAAACATTCCTTGT
TATATGAATATTTTACAGTTTACAACGAGCTGACCAAGGTTAAATACGTGACGGAAGGAATGCGCAAGCCCGCTTTT
CTTAGCGGTGAGCAAAAAAAGGCGATCGTCGACCTGTTATTCAAAACGAATCGTAAGGTGACTGTAAAGCAACTCAA
AGAAGATTACTTCAAAAAGATTGAGTGCTTCGACAGCGTCGAAATCTCTGGGGTAGAGGATCGGTTTAACGCAAGTT
TAGGTACCTACCATGACCTGCTTAAAATCATTAAGGATAAAGACTTCTTAGATAATGAAGAGAACGAAGATATTCTC
GAGGACATCGTCTTGACGTTAACCTTATTTGAGGATCGTGAAATGATTGAGGAACGCCTCAAAACTTATGCCCACCT
GTTCGACGATAAGGTGATGAAGCAGCTGAAACGTCGGCGCTACACAGGATGGGGCCGCTTGAGTCGCAAACTTATTA
ACGGAATCCGTGACAAGCAATCCGGCAAAACGATTCTGGATTTCTTGAAGTCGGACGGATTTGCTAATCGCAACTTC
ATGCAGTTGATCCATGATGACTCCCTGACTTTTAAAGAGGATATTCAAAAGGCGCAGGTTAGTGGTCAAGGCGACAG
CTTACACGAACACATCGCAAATTTGGCTGGTTCGCCGGCCATTAAAAAGGGGATCCTCCAGACCGTGAAAGTTGTAG
ATGAGCTTGTTAAGGTCATGGGTCGTCATAAGCCCGAAAACATCGTGATTGAAATGGCGCGGGAGAATCAAACGACC
CAGAAAGGACAAAAGAATAGCCGTGAACGGATGAAGCGGATCGAGGAAGGCATTAAAGAGCTGGGGTCTCAAATCTT
GAAGGAACACCCTGTGGAGAACACTCAGCTCCAAAATGAAAAACTTTACCTGTACTATTTGCAGAACGGACGCGATA
TGTACGTGGACCAAGAGTTGGATATTAATCGGCTGAGTGACTACGACGTTGATCATATCGTCCCGCAGAGCTTCCTC
AAAGACGATTCTATTGACAATAAGGTACTGACGCGCTCTGATAAAAACCGTGGTAAGTCGGACAACGTGCCCTCCGA
AGAGGTTGTGAAAAAGATGAAAAATTATTGGCGCCAGCTTTTAAACGCGAAGCTGATCACACAACGTAAATTCGATA
ATTTGACCAAGGCTGAACGGGGTGGCCTGAGCGAGTTAGATAAGGCAGGATTTATTAAACGCCAGTTAGTGGAGACT
CGTCAAATCACCAAACATGTCGCGCAGATTTTGGACAGCCGGATGAACACCAAGTACGATGAAAATGACAAACTGAT
CCGTGAGGTGAAAGTCATTACTCTGAAGTCCAAATTAGTTAGTGATTTCCGGAAGGACTTTCAATTCTACAAAGTCC
GTGAAATTAATAACTATCATCACGCACATGACGCGTACCTGAATGCAGTGGTTGGGACCGCCCTTATCAAGAAATAT
CCTAAGCTGGAGTCGGAGTTTGTCTATGGCGACTATAAGGTATACGATGTTCGCAAAATGATTGCGAAATCTGAGCA
GGAGATCGGTAAGGCAACCGCAAAATATTTCTTTTACTCAAACATTATGAATTTCTTTAAGACAGAAATCACTCTGG
CCAACGGGGAGATTCGCAAACGTCCGTTGATCGAAACAAACGGCGAGACTGGCGAAATTGTTTGGGACAAAGGGCGT
GATTTCGCGACGGTGCGCAAGGTACTGAGCATGCCTCAAGTCAATATTGTTAAGAAAACCGAAGTGCAGACGGGCGG
GTTTTCCAAGGAAAGCATCTTACCCAAACGTAATTCAGATAAACTTATTGCACGCAAAAAGGACTGGGATCCGAAAA
AGTATGGAGGCTTCGACAGTCCAACCGTAGCCTACTCTGTTCTCGTTGTAGCGAAAGTAGAAAAGGGTAAATCCAAG
AAACTGAAATCTGTCAAGGAGTTGCTTGGAATCACCATTATGGAGCGTAGCTCCTTCGAGAAGAACCCGATTGACTT
TCTGGAAGCCAAAGGATATAAAGAGGTCAAGAAAGATCTTATCATTAAGCTGCCTAAGTATTCACTCTTCGAGCTGG
AAAATGGTCGTAAACGCATGCTCGCTTCTGCCGGCGAGTTGCAGAAGGGCAATGAATTAGCACTTCCATCAAAGTAC
GTTAACTTCCTGTATTTGGCCAGCCATTACGAGAAACTGAAGGGGTCTCCAGAGGACAACGAACAGAAACAATTATT
TGTAGAGCAGCACAAGCATTATCTTGATGAAATCATTGAGCAAATTTCCGAATTCAGTAAACGCGTAATCCTGGCCG
ATGCAAACCTCGACAAGGTGCTGAGCGCTTACAATAAGCATCGCGACAAACCTATCCGTGAGCAGGCTGAAAATATC
ATTCACCTGTTCACATTAACGAACCTGGGCGCTCCGGCCGCTTTTAAATATTTCGACACGACAATCGACCGTAAGCG
CTATACCAGTACGAAAGAAGTGTTGGATGCGACCCTTATTCACCAGTCAATTACAGGATTATATGAGACCCGTATCG
ACCTTAGCCAATTAGGTGGGGATGCGCCAGCGCCTGCTCCTGCACCCGCTCCAGCTCCTGCCCCAGCTCCAGCGCCC
GCTCCTGCACCTGCGATGGTTAGCAAAGGTGAAGAACTGTTTACCGGCGTTGTGCCGATTCTGGTGGAACTGGATGG
TGATGTGAATGGCCATAAATTTAGCGTTagcGGCGAAGGCGAAGGTGATGCGACCtatGGTAAACTGACCCTGAAAT
TTATTTGCACCACCGGTAAACTGCCGGTTCCGTGGCCGACCCTGGTGACCACCCTGACCTATGGCGTTCAGTGCTTT
AGCCGCTATCCGGATCATATGAAAcagCATGATTTCTTTAAAAGCGCGATGCCGGAAGGCTATGTGCAGGAACGTAC
CATTtttTTCAAAGATGATGGCaacTATAAAACCCGTGCGGAAGTTAAATTTGAAGGCGATACCCTGGTGAACCGCA
TTGAACTGAAAGGTATTGATTTTAAAGAAGATGGCAACATTCTGGGTCATAAACTGGAATATAATtacAACAGCCAT
AATGTGTATATTatgGCCGATAAACAGAAAAATGGCATCAAAgtgAACTTTAAAATCCGTCACAACattGAAGATGG
TAGCGTGCAGCTGGCGGATCATTATCAGCAGAATACCCCGATTGGTGATGGCCCGGTGCTGCTGCCGGATAATCATT
ATCTGAGCACCCAGAGCgcgCTGAGCAAAGATCCGAATGAAAAACGTGATCATATGGTGCTGCTGGAATTTGTTACC
GCCGCGGGCATTACCctgGGTATGGATGAACTGTATAAA
(Cas9-APAPAPAPAPAPAPAPAPAPAPAPA(SEQ ID NO: 21)-eGFP chimera DNA sequence)
SEQ ID NO: 365
ATGGACAAAAAGTACTCTATTGGCCTGGATATCGGGACCAACAGCGTCGGGTGGGCTGTTATCACCGACGAGTATAA
AGTACCTTCGAAAAAGTTCAAAGTGCTGGGCAACACCGATCGCCATTCAATCAAAAAGAACTTGATTGGTGCGCTGT
TGTTTGACTCCGGGGAAACCGCCGAGGCGACTCGCCTTAAACGTACAGCACGTCGCCGGTACACTCGGCGTAAGAAT
CGCATTTGCTATTTGCAGGAAATCTTTAGCAACGAGATGGCAAAAGTCGATGACTCGTTTTTCCACCGCCTCGAGGA
AAGCTTTCTGGTGGAGGAAGACAAAAAGCATGAGCGTCACCCGATCTTCGGCAACATTGTCGATGAAGTAGCGTATC
ATGAAAAATACCCAACCATTTACCACTTACGCAAAAAGCTGGTGGACAGCACTGACAAAGCTGATTTGCGCCTTATC
TATTTAGCCCTGGCACATATGATTAAGTTTCGTGGTCACTTCCTGATCGAAGGAGACTTAAATCCCGACAACAGTGA
TGTTGATAAATTGTTTATTCAGCTTGTCCAAACTTACAATCAACTGTTCGAGGAAAACCCGATCAATGCCTCCGGTG
TGGATGCAAAAGCCATTTTAAGTGCACGCCTTAGCAAGTCCCGTCGCTTAGAAAACCTTATCGCGCAGCTGCCCGGC
GAGAAAAAGAATGGTTTGTTTGGGAACCTTATTGCCTTGAGCTTAGGCCTCACCCCGAATTTCAAAAGTAATTTCGA
TCTTGCAGAAGACGCCAAATTACAACTGTCGAAGGATACTTATGATGACGATCTCGATAATCTGTTAGCGCAGATTG
GTGACCAATACGCCGATCTTTTTCTGGCGGCTAAAAATCTGAGCGACGCCATCTTGCTTTCGGATATTCTCCGCGTT
AACACCGAAATCACGAAAGCGCCTCTTAGTGCCAGCATGATTAAACGTTATGATGAACACCACCAGGACCTGACCTT
ACTCAAAGCGTTGGTTCGCCAGCAACTGCCAGAGAAGTACAAAGAAATCTTCTTTGATCAGTCAAAGAATGGTTATG
CCGGCTATATTGACGGGGGTGCAAGCCAAGAGGAATTCTACAAATTTATCAAGCCTATTCTGGAGAAAATGGATGGC
ACCGAAGAGTTATTGGTGAAGCTTAACCGTGAAGACCTCCTGCGGAAACAGCGCACATTCGATAATGGTTCGATCCC
ACACCAAATCCATTTGGGGGAGTTACACGCTATTTTGCGTCGCCAGGAAGACTTTTACCCTTTCCTGAAGGATAACC
GGGAGAAAATTGAGAAGATCCTTACCTTTCGTATTCCGTATTACGTAGGCCCCTTAGCACGGGGTAATAGCCGTTTC
GCGTGGATGACACGGAAGTCGGAAGAGACGATCACCCCGTGGAACTTCGAAGAGGTAGTCGACAAGGGCGCATCAGC
GCAGTCTTTTATTGAACGTATGACGAATTTCGATAAAAACTTGCCCAATGAGAAGGTGCTTCCGAAACATTCCTTGT
TATATGAATATTTTACAGTTTACAACGAGCTGACCAAGGTTAAATACGTGACGGAAGGAATGCGCAAGCCCGCTTTT
CTTAGCGGTGAGCAAAAAAAGGCGATCGTCGACCTGTTATTCAAAACGAATCGTAAGGTGACTGTAAAGCAACTCAA
AGAAGATTACTTCAAAAAGATTGAGTGCTTCGACAGCGTCGAAATCTCTGGGGTAGAGGATCGGTTTAACGCAAGTT
TAGGTACCTACCATGACCTGCTTAAAATCATTAAGGATAAAGACTTCTTAGATAATGAAGAGAACGAAGATATTCTC
GAGGACATCGTCTTGACGTTAACCTTATTTGAGGATCGTGAAATGATTGAGGAACGCCTCAAAACTTATGCCCACCT
GTTCGACGATAAGGTGATGAAGCAGCTGAAACGTCGGCGCTACACAGGATGGGGCCGCTTGAGTCGCAAACTTATTA
ACGGAATCCGTGACAAGCAATCCGGCAAAACGATTCTGGATTTCTTGAAGTCGGACGGATTTGCTAATCGCAACTTC
ATGCAGTTGATCCATGATGACTCCCTGACTTTTAAAGAGGATATTCAAAAGGCGCAGGTTAGTGGTCAAGGCGACAG
CTTACACGAACACATCGCAAATTTGGCTGGTTCGCCGGCCATTAAAAAGGGGATCCTCCAGACCGTGAAAGTTGTAG
ATGAGCTTGTTAAGGTCATGGGTCGTCATAAGCCCGAAAACATCGTGATTGAAATGGCGCGGGAGAATCAAACGACC
CAGAAAGGACAAAAGAATAGCCGTGAACGGATGAAGCGGATCGAGGAAGGCATTAAAGAGCTGGGGTCTCAAATCTT
GAAGGAACACCCTGTGGAGAACACTCAGCTCCAAAATGAAAAACTTTACCTGTACTATTTGCAGAACGGACGCGATA
TGTACGTGGACCAAGAGTTGGATATTAATCGGCTGAGTGACTACGACGTTGATCATATCGTCCCGCAGAGCTTCCTC
AAAGACGATTCTATTGACAATAAGGTACTGACGCGCTCTGATAAAAACCGTGGTAAGTCGGACAACGTGCCCTCCGA
AGAGGTTGTGAAAAAGATGAAAAATTATTGGCGCCAGCTTTTAAACGCGAAGCTGATCACACAACGTAAATTCGATA
ATTTGACCAAGGCTGAACGGGGTGGCCTGAGCGAGTTAGATAAGGCAGGATTTATTAAACGCCAGTTAGTGGAGACT
CGTCAAATCACCAAACATGTCGCGCAGATTTTGGACAGCCGGATGAACACCAAGTACGATGAAAATGACAAACTGAT
CCGTGAGGTGAAAGTCATTACTCTGAAGTCCAAATTAGTTAGTGATTTCCGGAAGGACTTTCAATTCTACAAAGTCC
GTGAAATTAATAACTATCATCACGCACATGACGCGTACCTGAATGCAGTGGTTGGGACCGCCCTTATCAAGAAATAT
CCTAAGCTGGAGTCGGAGTTTGTCTATGGCGACTATAAGGTATACGATGTTCGCAAAATGATTGCGAAATCTGAGCA
GGAGATCGGTAAGGCAACCGCAAAATATTTCTTTTACTCAAACATTATGAATTTCTTTAAGACAGAAATCACTCTGG
CCAACGGGGAGATTCGCAAACGTCCGTTGATCGAAACAAACGGCGAGACTGGCGAAATTGTTTGGGACAAAGGGCGT
GATTTCGCGACGGTGCGCAAGGTACTGAGCATGCCTCAAGTCAATATTGTTAAGAAAACCGAAGTGCAGACGGGCGG
GTTTTCCAAGGAAAGCATCTTACCCAAACGTAATTCAGATAAACTTATTGCACGCAAAAAGGACTGGGATCCGAAAA
AGTATGGAGGCTTCGACAGTCCAACCGTAGCCTACTCTGTTCTCGTTGTAGCGAAAGTAGAAAAGGGTAAATCCAAG
AAACTGAAATCTGTCAAGGAGTTGCTTGGAATCACCATTATGGAGCGTAGCTCCTTCGAGAAGAACCCGATTGACTT
TCTGGAAGCCAAAGGATATAAAGAGGTCAAGAAAGATCTTATCATTAAGCTGCCTAAGTATTCACTCTTCGAGCTGG
AAAATGGTCGTAAACGCATGCTCGCTTCTGCCGGCGAGTTGCAGAAGGGCAATGAATTAGCACTTCCATCAAAGTAC
GTTAACTTCCTGTATTTGGCCAGCCATTACGAGAAACTGAAGGGGTCTCCAGAGGACAACGAACAGAAACAATTATT
TGTAGAGCAGCACAAGCATTATCTTGATGAAATCATTGAGCAAATTTCCGAATTCAGTAAACGCGTAATCCTGGCCG
ATGCAAACCTCGACAAGGTGCTGAGCGCTTACAATAAGCATCGCGACAAACCTATCCGTGAGCAGGCTGAAAATATC
ATTCACCTGTTCACATTAACGAACCTGGGCGCTCCGGCCGCTTTTAAATATTTCGACACGACAATCGACCGTAAGCG
CTATACCAGTACGAAAGAAGTGTTGGATGCGACCCTTATTCACCAGTCAATTACAGGATTATATGAGACCCGTATCG
ACCTTAGCCAATTAGGTGGGGATGCGCCAGCGCCTGCTCCTGCACCCGCTCCAGCTCCTGCCCCAGCTCCAGCGCCC
GCTCCTGCTCCTGCACCTGCGATGGTTAGCAAAGGTGAAGAACTGTTTACCGGCGTTGTGCCGATTCTGGTGGAACT
GGATGGTGATGTGAATGGCCATAAATTTAGCGTTagcGGCGAAGGCGAAGGTGATGCGACCtatGGTAAACTGACCC
TGAAATTTATTTGCACCACCGGTAAACTGCCGGTTCCGTGGCCGACCCTGGTGACCACCCTGACCTATGGCGTTCAG
TGCTTTAGCCGCTATCCGGATCATATGAAAcagCATGATTTCTTTAAAAGCGCGATGCCGGAAGGCTATGTGCAGGA
ACGTACCATTtttTTCAAAGATGATGGCaacTATAAAACCCGTGCGGAAGTTAAATTTGAAGGCGATACCCTGGTGA
ACCGCATTGAACTGAAAGGTATTGATTTTAAAGAAGATGGCAACATTCTGGGTCATAAACTGGAATATAATtacAAC
AGCCATAATGTGTATATTatgGCCGATAAACAGAAAAATGGCATCAAAgtgAACTTTAAAATCCGTCACAACattGA
AGATGGTAGCGTGCAGCTGGCGGATCATTATCAGCAGAATACCCCGATTGGTGATGGCCCGGTGCTGCTGCCGGATA
ATCATTATCTGAGCACCCAGAGCgcgCTGAGCAAAGATCCGAATGAAAAACGTGATCATATGGTGCTGCTGGAATTT
GTTACCGCCGCGGGCATTACCctgGGTATGGATGAACTGTATAAA
(Cas9-APAPAPAPAPAPAPAPAPAPAPAPAPA(SEQ ID NO: 22)-eGFP chimera DNA sequence)
SEQ ID NO: 366
ATGGACAAAAAGTACTCTATTGGCCTGGATATCGGGACCAACAGCGTCGGGTGGGCTGTTATCACCGACGAGTATAA
AGTACCTTCGAAAAAGTTCAAAGTGCTGGGCAACACCGATCGCCATTCAATCAAAAAGAACTTGATTGGTGCGCTGT
TGTTTGACTCCGGGGAAACCGCCGAGGCGACTCGCCTTAAACGTACAGCACGTCGCCGGTACACTCGGCGTAAGAAT
CGCATTTGCTATTTGCAGGAAATCTTTAGCAACGAGATGGCAAAAGTCGATGACTCGTTTTTCCACCGCCTCGAGGA
AAGCTTTCTGGTGGAGGAAGACAAAAAGCATGAGCGTCACCCGATCTTCGGCAACATTGTCGATGAAGTAGCGTATC
ATGAAAAATACCCAACCATTTACCACTTACGCAAAAAGCTGGTGGACAGCACTGACAAAGCTGATTTGCGCCTTATC
TATTTAGCCCTGGCACATATGATTAAGTTTCGTGGTCACTTCCTGATCGAAGGAGACTTAAATCCCGACAACAGTGA
TGTTGATAAATTGTTTATTCAGCTTGTCCAAACTTACAATCAACTGTTCGAGGAAAACCCGATCAATGCCTCCGGTG
TGGATGCAAAAGCCATTTTAAGTGCACGCCTTAGCAAGTCCCGTCGCTTAGAAAACCTTATCGCGCAGCTGCCCGGC
GAGAAAAAGAATGGTTTGTTTGGGAACCTTATTGCCTTGAGCTTAGGCCTCACCCCGAATTTCAAAAGTAATTTCGA
TCTTGCAGAAGACGCCAAATTACAACTGTCGAAGGATACTTATGATGACGATCTCGATAATCTGTTAGCGCAGATTG
GTGACCAATACGCCGATCTTTTTCTGGCGGCTAAAAATCTGAGCGACGCCATCTTGCTTTCGGATATTCTCCGCGTT
AACACCGAAATCACGAAAGCGCCTCTTAGTGCCAGCATGATTAAACGTTATGATGAACACCACCAGGACCTGACCTT
ACTCAAAGCGTTGGTTCGCCAGCAACTGCCAGAGAAGTACAAAGAAATCTTCTTTGATCAGTCAAAGAATGGTTATG
CCGGCTATATTGACGGGGGTGCAAGCCAAGAGGAATTCTACAAATTTATCAAGCCTATTCTGGAGAAAATGGATGGC
ACCGAAGAGTTATTGGTGAAGCTTAACCGTGAAGACCTCCTGCGGAAACAGCGCACATTCGATAATGGTTCGATCCC
ACACCAAATCCATTTGGGGGAGTTACACGCTATTTTGCGTCGCCAGGAAGACTTTTACCCTTTCCTGAAGGATAACC
GGGAGAAAATTGAGAAGATCCTTACCTTTCGTATTCCGTATTACGTAGGCCCCTTAGCACGGGGTAATAGCCGTTTC
GCGTGGATGACACGGAAGTCGGAAGAGACGATCACCCCGTGGAACTTCGAAGAGGTAGTCGACAAGGGCGCATCAGC
GCAGTCTTTTATTGAACGTATGACGAATTTCGATAAAAACTTGCCCAATGAGAAGGTGCTTCCGAAACATTCCTTGT
TATATGAATATTTTACAGTTTACAACGAGCTGACCAAGGTTAAATACGTGACGGAAGGAATGCGCAAGCCCGCTTTT
CTTAGCGGTGAGCAAAAAAAGGCGATCGTCGACCTGTTATTCAAAACGAATCGTAAGGTGACTGTAAAGCAACTCAA
AGAAGATTACTTCAAAAAGATTGAGTGCTTCGACAGCGTCGAAATCTCTGGGGTAGAGGATCGGTTTAACGCAAGTT
TAGGTACCTACCATGACCTGCTTAAAATCATTAAGGATAAAGACTTCTTAGATAATGAAGAGAACGAAGATATTCTC
GAGGACATCGTCTTGACGTTAACCTTATTTGAGGATCGTGAAATGATTGAGGAACGCCTCAAAACTTATGCCCACCT
GTTCGACGATAAGGTGATGAAGCAGCTGAAACGTCGGCGCTACACAGGATGGGGCCGCTTGAGTCGCAAACTTATTA
ACGGAATCCGTGACAAGCAATCCGGCAAAACGATTCTGGATTTCTTGAAGTCGGACGGATTTGCTAATCGCAACTTC
ATGCAGTTGATCCATGATGACTCCCTGACTTTTAAAGAGGATATTCAAAAGGCGCAGGTTAGTGGTCAAGGCGACAG
CTTACACGAACACATCGCAAATTTGGCTGGTTCGCCGGCCATTAAAAAGGGGATCCTCCAGACCGTGAAAGTTGTAG
ATGAGCTTGTTAAGGTCATGGGTCGTCATAAGCCCGAAAACATCGTGATTGAAATGGCGCGGGAGAATCAAACGACC
CAGAAAGGACAAAAGAATAGCCGTGAACGGATGAAGCGGATCGAGGAAGGCATTAAAGAGCTGGGGTCTCAAATCTT
GAAGGAACACCCTGTGGAGAACACTCAGCTCCAAAATGAAAAACTTTACCTGTACTATTTGCAGAACGGACGCGATA
TGTACGTGGACCAAGAGTTGGATATTAATCGGCTGAGTGACTACGACGTTGATCATATCGTCCCGCAGAGCTTCCTC
AAAGACGATTCTATTGACAATAAGGTACTGACGCGCTCTGATAAAAACCGTGGTAAGTCGGACAACGTGCCCTCCGA
AGAGGTTGTGAAAAAGATGAAAAATTATTGGCGCCAGCTTTTAAACGCGAAGCTGATCACACAACGTAAATTCGATA
ATTTGACCAAGGCTGAACGGGGTGGCCTGAGCGAGTTAGATAAGGCAGGATTTATTAAACGCCAGTTAGTGGAGACT
CGTCAAATCACCAAACATGTCGCGCAGATTTTGGACAGCCGGATGAACACCAAGTACGATGAAAATGACAAACTGAT
CCGTGAGGTGAAAGTCATTACTCTGAAGTCCAAATTAGTTAGTGATTTCCGGAAGGACTTTCAATTCTACAAAGTCC
GTGAAATTAATAACTATCATCACGCACATGACGCGTACCTGAATGCAGTGGTTGGGACCGCCCTTATCAAGAAATAT
CCTAAGCTGGAGTCGGAGTTTGTCTATGGCGACTATAAGGTATACGATGTTCGCAAAATGATTGCGAAATCTGAGCA
GGAGATCGGTAAGGCAACCGCAAAATATTTCTTTTACTCAAACATTATGAATTTCTTTAAGACAGAAATCACTCTGG
CCAACGGGGAGATTCGCAAACGTCCGTTGATCGAAACAAACGGCGAGACTGGCGAAATTGTTTGGGACAAAGGGCGT
GATTTCGCGACGGTGCGCAAGGTACTGAGCATGCCTCAAGTCAATATTGTTAAGAAAACCGAAGTGCAGACGGGCGG
GTTTTCCAAGGAAAGCATCTTACCCAAACGTAATTCAGATAAACTTATTGCACGCAAAAAGGACTGGGATCCGAAAA
AGTATGGAGGCTTCGACAGTCCAACCGTAGCCTACTCTGTTCTCGTTGTAGCGAAAGTAGAAAAGGGTAAATCCAAG
AAACTGAAATCTGTCAAGGAGTTGCTTGGAATCACCATTATGGAGCGTAGCTCCTTCGAGAAGAACCCGATTGACTT
TCTGGAAGCCAAAGGATATAAAGAGGTCAAGAAAGATCTTATCATTAAGCTGCCTAAGTATTCACTCTTCGAGCTGG
AAAATGGTCGTAAACGCATGCTCGCTTCTGCCGGCGAGTTGCAGAAGGGCAATGAATTAGCACTTCCATCAAAGTAC
GTTAACTTCCTGTATTTGGCCAGCCATTACGAGAAACTGAAGGGGTCTCCAGAGGACAACGAACAGAAACAATTATT
TGTAGAGCAGCACAAGCATTATCTTGATGAAATCATTGAGCAAATTTCCGAATTCAGTAAACGCGTAATCCTGGCCG
ATGCAAACCTCGACAAGGTGCTGAGCGCTTACAATAAGCATCGCGACAAACCTATCCGTGAGCAGGCTGAAAATATC
ATTCACCTGTTCACATTAACGAACCTGGGCGCTCCGGCCGCTTTTAAATATTTCGACACGACAATCGACCGTAAGCG
CTATACCAGTACGAAAGAAGTGTTGGATGCGACCCTTATTCACCAGTCAATTACAGGATTATATGAGACCCGTATCG
ACCTTAGCCAATTAGGTGGGGATGCGCCAGCGCCTGCTCCTGCACCCGCTCCAGCTCCTGCCCCAGCTCCAGCGCCC
GCTCCTGCGCCAGCTCCTGCACCTGCGATGGTTAGCAAAGGTGAAGAACTGTTTACCGGCGTTGTGCCGATTCTGGT
GGAACTGGATGGTGATGTGAATGGCCATAAATTTAGCGTTagcGGCGAAGGCGAAGGTGATGCGACCtatGGTAAAC
TGACCCTGAAATTTATTTGCACCACCGGTAAACTGCCGGTTCCGTGGCCGACCCTGGTGACCACCCTGACCTATGGC
GTTCAGTGCTTTAGCCGCTATCCGGATCATATGAAAcagCATGATTTCTTTAAAAGCGCGATGCCGGAAGGCTATGT
GCAGGAACGTACCATTtttTTCAAAGATGATGGCaacTATAAAACCCGTGCGGAAGTTAAATTTGAAGGCGATACCC
TGGTGAACCGCATTGAACTGAAAGGTATTGATTTTAAAGAAGATGGCAACATTCTGGGTCATAAACTGGAATATAAT
tacAACAGCCATAATGTGTATATTatgGCCGATAAACAGAAAAATGGCATCAAAgtgAACTTTAAAATCCGTCACAA
CattGAAGATGGTAGCGTGCAGCTGGCGGATCATTATCAGCAGAATACCCCGATTGGTGATGGCCCGGTGCTGCTGC
CGGATAATCATTATCTGAGCACCCAGAGCgcgCTGAGCAAAGATCCGAATGAAAAACGTGATCATATGGTGCTGCTG
GAATTTGTTACCGCCGCGGGCATTACCctgGGTATGGATGAACTGTATAAA
(Cas9-APAPAPAPAPAPAPAPAPAPAPAPAPAPA(SEQ ID NO: 23)-eGFP chimera DNA sequence)
SEQ ID NO: 367
ATGGACAAAAAGTACTCTATTGGCCTGGATATCGGGACCAACAGCGTCGGGTGGGCTGTTATCACCGACGAGTATAA
AGTACCTTCGAAAAAGTTCAAAGTGCTGGGCAACACCGATCGCCATTCAATCAAAAAGAACTTGATTGGTGCGCTGT
TGTTTGACTCCGGGGAAACCGCCGAGGCGACTCGCCTTAAACGTACAGCACGTCGCCGGTACACTCGGCGTAAGAAT
CGCATTTGCTATTTGCAGGAAATCTTTAGCAACGAGATGGCAAAAGTCGATGACTCGTTTTTCCACCGCCTCGAGGA
AAGCTTTCTGGTGGAGGAAGACAAAAAGCATGAGCGTCACCCGATCTTCGGCAACATTGTCGATGAAGTAGCGTATC
ATGAAAAATACCCAACCATTTACCACTTACGCAAAAAGCTGGTGGACAGCACTGACAAAGCTGATTTGCGCCTTATC
TATTTAGCCCTGGCACATATGATTAAGTTTCGTGGTCACTTCCTGATCGAAGGAGACTTAAATCCCGACAACAGTGA
TGTTGATAAATTGTTTATTCAGCTTGTCCAAACTTACAATCAACTGTTCGAGGAAAACCCGATCAATGCCTCCGGTG
TGGATGCAAAAGCCATTTTAAGTGCACGCCTTAGCAAGTCCCGTCGCTTAGAAAACCTTATCGCGCAGCTGCCCGGC
GAGAAAAAGAATGGTTTGTTTGGGAACCTTATTGCCTTGAGCTTAGGCCTCACCCCGAATTTCAAAAGTAATTTCGA
TCTTGCAGAAGACGCCAAATTACAACTGTCGAAGGATACTTATGATGACGATCTCGATAATCTGTTAGCGCAGATTG
GTGACCAATACGCCGATCTTTTTCTGGCGGCTAAAAATCTGAGCGACGCCATCTTGCTTTCGGATATTCTCCGCGTT
AACACCGAAATCACGAAAGCGCCTCTTAGTGCCAGCATGATTAAACGTTATGATGAACACCACCAGGACCTGACCTT
ACTCAAAGCGTTGGTTCGCCAGCAACTGCCAGAGAAGTACAAAGAAATCTTCTTTGATCAGTCAAAGAATGGTTATG
CCGGCTATATTGACGGGGGTGCAAGCCAAGAGGAATTCTACAAATTTATCAAGCCTATTCTGGAGAAAATGGATGGC
ACCGAAGAGTTATTGGTGAAGCTTAACCGTGAAGACCTCCTGCGGAAACAGCGCACATTCGATAATGGTTCGATCCC
ACACCAAATCCATTTGGGGGAGTTACACGCTATTTTGCGTCGCCAGGAAGACTTTTACCCTTTCCTGAAGGATAACC
GGGAGAAAATTGAGAAGATCCTTACCTTTCGTATTCCGTATTACGTAGGCCCCTTAGCACGGGGTAATAGCCGTTTC
GCGTGGATGACACGGAAGTCGGAAGAGACGATCACCCCGTGGAACTTCGAAGAGGTAGTCGACAAGGGCGCATCAGC
GCAGTCTTTTATTGAACGTATGACGAATTTCGATAAAAACTTGCCCAATGAGAAGGTGCTTCCGAAACATTCCTTGT
TATATGAATATTTTACAGTTTACAACGAGCTGACCAAGGTTAAATACGTGACGGAAGGAATGCGCAAGCCCGCTTTT
CTTAGCGGTGAGCAAAAAAAGGCGATCGTCGACCTGTTATTCAAAACGAATCGTAAGGTGACTGTAAAGCAACTCAA
AGAAGATTACTTCAAAAAGATTGAGTGCTTCGACAGCGTCGAAATCTCTGGGGTAGAGGATCGGTTTAACGCAAGTT
TAGGTACCTACCATGACCTGCTTAAAATCATTAAGGATAAAGACTTCTTAGATAATGAAGAGAACGAAGATATTCTC
GAGGACATCGTCTTGACGTTAACCTTATTTGAGGATCGTGAAATGATTGAGGAACGCCTCAAAACTTATGCCCACCT
GTTCGACGATAAGGTGATGAAGCAGCTGAAACGTCGGCGCTACACAGGATGGGGCCGCTTGAGTCGCAAACTTATTA
ACGGAATCCGTGACAAGCAATCCGGCAAAACGATTCTGGATTTCTTGAAGTCGGACGGATTTGCTAATCGCAACTTC
ATGCAGTTGATCCATGATGACTCCCTGACTTTTAAAGAGGATATTCAAAAGGCGCAGGTTAGTGGTCAAGGCGACAG
CTTACACGAACACATCGCAAATTTGGCTGGTTCGCCGGCCATTAAAAAGGGGATCCTCCAGACCGTGAAAGTTGTAG
ATGAGCTTGTTAAGGTCATGGGTCGTCATAAGCCCGAAAACATCGTGATTGAAATGGCGCGGGAGAATCAAACGACC
CAGAAAGGACAAAAGAATAGCCGTGAACGGATGAAGCGGATCGAGGAAGGCATTAAAGAGCTGGGGTCTCAAATCTT
GAAGGAACACCCTGTGGAGAACACTCAGCTCCAAAATGAAAAACTTTACCTGTACTATTTGCAGAACGGACGCGATA
TGTACGTGGACCAAGAGTTGGATATTAATCGGCTGAGTGACTACGACGTTGATCATATCGTCCCGCAGAGCTTCCTC
AAAGACGATTCTATTGACAATAAGGTACTGACGCGCTCTGATAAAAACCGTGGTAAGTCGGACAACGTGCCCTCCGA
AGAGGTTGTGAAAAAGATGAAAAATTATTGGCGCCAGCTTTTAAACGCGAAGCTGATCACACAACGTAAATTCGATA
ATTTGACCAAGGCTGAACGGGGTGGCCTGAGCGAGTTAGATAAGGCAGGATTTATTAAACGCCAGTTAGTGGAGACT
CGTCAAATCACCAAACATGTCGCGCAGATTTTGGACAGCCGGATGAACACCAAGTACGATGAAAATGACAAACTGAT
CCGTGAGGTGAAAGTCATTACTCTGAAGTCCAAATTAGTTAGTGATTTCCGGAAGGACTTTCAATTCTACAAAGTCC
GTGAAATTAATAACTATCATCACGCACATGACGCGTACCTGAATGCAGTGGTTGGGACCGCCCTTATCAAGAAATAT
CCTAAGCTGGAGTCGGAGTTTGTCTATGGCGACTATAAGGTATACGATGTTCGCAAAATGATTGCGAAATCTGAGCA
GGAGATCGGTAAGGCAACCGCAAAATATTTCTTTTACTCAAACATTATGAATTTCTTTAAGACAGAAATCACTCTGG
CCAACGGGGAGATTCGCAAACGTCCGTTGATCGAAACAAACGGCGAGACTGGCGAAATTGTTTGGGACAAAGGGCGT
GATTTCGCGACGGTGCGCAAGGTACTGAGCATGCCTCAAGTCAATATTGTTAAGAAAACCGAAGTGCAGACGGGCGG
GTTTTCCAAGGAAAGCATCTTACCCAAACGTAATTCAGATAAACTTATTGCACGCAAAAAGGACTGGGATCCGAAAA
AGTATGGAGGCTTCGACAGTCCAACCGTAGCCTACTCTGTTCTCGTTGTAGCGAAAGTAGAAAAGGGTAAATCCAAG
AAACTGAAATCTGTCAAGGAGTTGCTTGGAATCACCATTATGGAGCGTAGCTCCTTCGAGAAGAACCCGATTGACTT
TCTGGAAGCCAAAGGATATAAAGAGGTCAAGAAAGATCTTATCATTAAGCTGCCTAAGTATTCACTCTTCGAGCTGG
AAAATGGTCGTAAACGCATGCTCGCTTCTGCCGGCGAGTTGCAGAAGGGCAATGAATTAGCACTTCCATCAAAGTAC
GTTAACTTCCTGTATTTGGCCAGCCATTACGAGAAACTGAAGGGGTCTCCAGAGGACAACGAACAGAAACAATTATT
TGTAGAGCAGCACAAGCATTATCTTGATGAAATCATTGAGCAAATTTCCGAATTCAGTAAACGCGTAATCCTGGCCG
ATGCAAACCTCGACAAGGTGCTGAGCGCTTACAATAAGCATCGCGACAAACCTATCCGTGAGCAGGCTGAAAATATC
ATTCACCTGTTCACATTAACGAACCTGGGCGCTCCGGCCGCTTTTAAATATTTCGACACGACAATCGACCGTAAGCG
CTATACCAGTACGAAAGAAGTGTTGGATGCGACCCTTATTCACCAGTCAATTACAGGATTATATGAGACCCGTATCG
ACCTTAGCCAATTAGGTGGGGATGCGCCAGCGCCTGCTCCTGCACCCGCTCCAGCTCCTGCCCCAGCTCCAGCGCCC
GCTCCTGCGCCAGCTCCTGCACCTGCTCCAGCGATGGTTAGCAAAGGTGAAGAACTGTTTACCGGCGTTGTGCCGAT
TCTGGTGGAACTGGATGGTGATGTGAATGGCCATAAATTTAGCGTTagcGGCGAAGGCGAAGGTGATGCGACCtatG
GTAAACTGACCCTGAAATTTATTTGCACCACCGGTAAACTGCCGGTTCCGTGGCCGACCCTGGTGACCACCCTGACC
TATGGCGTTCAGTGCTTTAGCCGCTATCCGGATCATATGAAAcagCATGATTTCTTTAAAAGCGCGATGCCGGAAGG
CTATGTGCAGGAACGTACCATTtttTTCAAAGATGATGGCaacTATAAAACCCGTGCGGAAGTTAAATTTGAAGGCG
ATACCCTGGTGAACCGCATTGAACTGAAAGGTATTGATTTTAAAGAAGATGGCAACATTCTGGGTCATAAACTGGAA
TATAATtacAACAGCCATAATGTGTATATTatgGCCGATAAACAGAAAAATGGCATCAAAgtgAACTTTAAAATCCG
TCACAACattGAAGATGGTAGCGTGCAGCTGGCGGATCATTATCAGCAGAATACCCCGATTGGTGATGGCCCGGTGC
TGCTGCCGGATAATCATTATCTGAGCACCCAGAGCgcgCTGAGCAAAGATCCGAATGAAAAACGTGATCATATGGTG
CTGCTGGAATTTGTTACCGCCGCGGGCATTACCctgGGTATGGATGAACTGTATAAA
(Cas9-GSAGSAAGSGEF(SEQ ID NO: 6)-mCherry chimera DNA sequence)
SEQ ID NO: 368
ATGGACAAAAAGTACTCTATTGGCCTGGATATCGGGACCAACAGCGTCGGGTGGGCTGTTATCACCGACGAGTATAA
AGTACCTTCGAAAAAGTTCAAAGTGCTGGGCAACACCGATCGCCATTCAATCAAAAAGAACTTGATTGGTGCGCTGT
TGTTTGACTCCGGGGAAACCGCCGAGGCGACTCGCCTTAAACGTACAGCACGTCGCCGGTACACTCGGCGTAAGAAT
CGCATTTGCTATTTGCAGGAAATCTTTAGCAACGAGATGGCAAAAGTCGATGACTCGTTTTTCCACCGCCTCGAGGA
AAGCTTTCTGGTGGAGGAAGACAAAAAGCATGAGCGTCACCCGATCTTCGGCAACATTGTCGATGAAGTAGCGTATC
ATGAAAAATACCCAACCATTTACCACTTACGCAAAAAGCTGGTGGACAGCACTGACAAAGCTGATTTGCGCCTTATC
TATTTAGCCCTGGCACATATGATTAAGTTTCGTGGTCACTTCCTGATCGAAGGAGACTTAAATCCCGACAACAGTGA
TGTTGATAAATTGTTTATTCAGCTTGTCCAAACTTACAATCAACTGTTCGAGGAAAACCCGATCAATGCCTCCGGTG
TGGATGCAAAAGCCATTTTAAGTGCACGCCTTAGCAAGTCCCGTCGCTTAGAAAACCTTATCGCGCAGCTGCCCGGC
GAGAAAAAGAATGGTTTGTTTGGGAACCTTATTGCCTTGAGCTTAGGCCTCACCCCGAATTTCAAAAGTAATTTCGA
TCTTGCAGAAGACGCCAAATTACAACTGTCGAAGGATACTTATGATGACGATCTCGATAATCTGTTAGCGCAGATTG
GTGACCAATACGCCGATCTTTTTCTGGCGGCTAAAAATCTGAGCGACGCCATCTTGCTTTCGGATATTCTCCGCGTT
AACACCGAAATCACGAAAGCGCCTCTTAGTGCCAGCATGATTAAACGTTATGATGAACACCACCAGGACCTGACCTT
ACTCAAAGCGTTGGTTCGCCAGCAACTGCCAGAGAAGTACAAAGAAATCTTCTTTGATCAGTCAAAGAATGGTTATG
CCGGCTATATTGACGGGGGTGCAAGCCAAGAGGAATTCTACAAATTTATCAAGCCTATTCTGGAGAAAATGGATGGC
ACCGAAGAGTTATTGGTGAAGCTTAACCGTGAAGACCTCCTGCGGAAACAGCGCACATTCGATAATGGTTCGATCCC
ACACCAAATCCATTTGGGGGAGTTACACGCTATTTTGCGTCGCCAGGAAGACTTTTACCCTTTCCTGAAGGATAACC
GGGAGAAAATTGAGAAGATCCTTACCTTTCGTATTCCGTATTACGTAGGCCCCTTAGCACGGGGTAATAGCCGTTTC
GCGTGGATGACACGGAAGTCGGAAGAGACGATCACCCCGTGGAACTTCGAAGAGGTAGTCGACAAGGGCGCATCAGC
GCAGTCTTTTATTGAACGTATGACGAATTTCGATAAAAACTTGCCCAATGAGAAGGTGCTTCCGAAACATTCCTTGT
TATATGAATATTTTACAGTTTACAACGAGCTGACCAAGGTTAAATACGTGACGGAAGGAATGCGCAAGCCCGCTTTT
CTTAGCGGTGAGCAAAAAAAGGCGATCGTCGACCTGTTATTCAAAACGAATCGTAAGGTGACTGTAAAGCAACTCAA
AGAAGATTACTTCAAAAAGATTGAGTGCTTCGACAGCGTCGAAATCTCTGGGGTAGAGGATCGGTTTAACGCAAGTT
TAGGTACCTACCATGACCTGCTTAAAATCATTAAGGATAAAGACTTCTTAGATAATGAAGAGAACGAAGATATTCTC
GAGGACATCGTCTTGACGTTAACCTTATTTGAGGATCGTGAAATGATTGAGGAACGCCTCAAAACTTATGCCCACCT
GTTCGACGATAAGGTGATGAAGCAGCTGAAACGTCGGCGCTACACAGGATGGGGCCGCTTGAGTCGCAAACTTATTA
ACGGAATCCGTGACAAGCAATCCGGCAAAACGATTCTGGATTTCTTGAAGTCGGACGGATTTGCTAATCGCAACTTC
ATGCAGTTGATCCATGATGACTCCCTGACTTTTAAAGAGGATATTCAAAAGGCGCAGGTTAGTGGTCAAGGCGACAG
CTTACACGAACACATCGCAAATTTGGCTGGTTCGCCGGCCATTAAAAAGGGGATCCTCCAGACCGTGAAAGTTGTAG
ATGAGCTTGTTAAGGTCATGGGTCGTCATAAGCCCGAAAACATCGTGATTGAAATGGCGCGGGAGAATCAAACGACC
CAGAAAGGACAAAAGAATAGCCGTGAACGGATGAAGCGGATCGAGGAAGGCATTAAAGAGCTGGGGTCTCAAATCTT
GAAGGAACACCCTGTGGAGAACACTCAGCTCCAAAATGAAAAACTTTACCTGTACTATTTGCAGAACGGACGCGATA
TGTACGTGGACCAAGAGTTGGATATTAATCGGCTGAGTGACTACGACGTTGATCATATCGTCCCGCAGAGCTTCCTC
AAAGACGATTCTATTGACAATAAGGTACTGACGCGCTCTGATAAAAACCGTGGTAAGTCGGACAACGTGCCCTCCGA
AGAGGTTGTGAAAAAGATGAAAAATTATTGGCGCCAGCTTTTAAACGCGAAGCTGATCACACAACGTAAATTCGATA
ATTTGACCAAGGCTGAACGGGGTGGCCTGAGCGAGTTAGATAAGGCAGGATTTATTAAACGCCAGTTAGTGGAGACT
CGTCAAATCACCAAACATGTCGCGCAGATTTTGGACAGCCGGATGAACACCAAGTACGATGAAAATGACAAACTGAT
CCGTGAGGTGAAAGTCATTACTCTGAAGTCCAAATTAGTTAGTGATTTCCGGAAGGACTTTCAATTCTACAAAGTCC
GTGAAATTAATAACTATCATCACGCACATGACGCGTACCTGAATGCAGTGGTTGGGACCGCCCTTATCAAGAAATAT
CCTAAGCTGGAGTCGGAGTTTGTCTATGGCGACTATAAGGTATACGATGTTCGCAAAATGATTGCGAAATCTGAGCA
GGAGATCGGTAAGGCAACCGCAAAATATTTCTTTTACTCAAACATTATGAATTTCTTTAAGACAGAAATCACTCTGG
CCAACGGGGAGATTCGCAAACGTCCGTTGATCGAAACAAACGGCGAGACTGGCGAAATTGTTTGGGACAAAGGGCGT
GATTTCGCGACGGTGCGCAAGGTACTGAGCATGCCTCAAGTCAATATTGTTAAGAAAACCGAAGTGCAGACGGGCGG
GTTTTCCAAGGAAAGCATCTTACCCAAACGTAATTCAGATAAACTTATTGCACGCAAAAAGGACTGGGATCCGAAAA
AGTATGGAGGCTTCGACAGTCCAACCGTAGCCTACTCTGTTCTCGTTGTAGCGAAAGTAGAAAAGGGTAAATCCAAG
AAACTGAAATCTGTCAAGGAGTTGCTTGGAATCACCATTATGGAGCGTAGCTCCTTCGAGAAGAACCCGATTGACTT
TCTGGAAGCCAAAGGATATAAAGAGGTCAAGAAAGATCTTATCATTAAGCTGCCTAAGTATTCACTCTTCGAGCTGG
AAAATGGTCGTAAACGCATGCTCGCTTCTGCCGGCGAGTTGCAGAAGGGCAATGAATTAGCACTTCCATCAAAGTAC
GTTAACTTCCTGTATTTGGCCAGCCATTACGAGAAACTGAAGGGGTCTCCAGAGGACAACGAACAGAAACAATTATT
TGTAGAGCAGCACAAGCATTATCTTGATGAAATCATTGAGCAAATTTCCGAATTCAGTAAACGCGTAATCCTGGCCG
ATGCAAACCTCGACAAGGTGCTGAGCGCTTACAATAAGCATCGCGACAAACCTATCCGTGAGCAGGCTGAAAATATC
ATTCACCTGTTCACATTAACGAACCTGGGCGCTCCGGCCGCTTTTAAATATTTCGACACGACAATCGACCGTAAGCG
CTATACCAGTACGAAAGAAGTGTTGGATGCGACCCTTATTCACCAGTCAATTACAGGATTATATGAGACCCGTATCG
ACCTTAGCCAATTAGGTGGGGATGGTAGCGCAGGTAGTGCAGCAGGTAGCGGTGAATTTATGGTGAGCAAAGGTGAA
GAGGATAATATGGCCATCATCAAAGAATTCATGCGCTTCAAAGTTCATATGGAAGGTAGCGTTAATGGCCACGAATT
TGAAATTGAAGGTGAAGGCGAAGGTCGTCCGTATGAAGGCACCCAGACCGCAAAACTGAAAGTTACCAAAGGTGGTC
CGCTGCCGTTTGCATGGGATATTCTGAGTCCGCAGTTTATGTATGGTAGCAAAGCCTATGTTAAACATCCGGCAGAT
ATCCCGGATTATCTGAAACTGAGCTTTCCGGAAGGTTTTAAATGGGAACGTGTGATGAATTTTGAAGATGGTGGTGT
TGTTACCGTTACACAGGATAGCAGCCTGCAGGATGGTGAATTTATCTATAAAGTTAAACTGCGTGGCACGAATTTTC
CGAGTGATGGTCCGGTTATGCAGAAAAAAACCATGGGTTGGGAAGCAAGCAGCGAACGTATGTATCCGGAAGATGGC
GCACTGAAAGGTGAAATTAAACAGCGTCTGAAGCTGAAAGATGGCGGTCATTATGATGCAGAAGTTAAAACCACCTA
CAAAGCCAAAAAACCGGTTCAGCTGCCTGGTGCATATAACGTTAACATTAAACTGGATATCACCAGCCACAACGAGG
ATTATACCATTGTTGAACAGTATGAACGTGCAGAAGGTCGCCATAGTACCGGTGGTATGGATGAACTGTATAAA
(Cas9-(GGGGS)₄-(SEQ ID NO: 7)mCherry chimera DNA sequence)
SEQ ID NO: 369
ATGGACAAAAAGTACTCTATTGGCCTGGATATCGGGACCAACAGCGTCGGGTGGGCTGTTATCACCGACGAGTATAA
AGTACCTTCGAAAAAGTTCAAAGTGCTGGGCAACACCGATCGCCATTCAATCAAAAAGAACTTGATTGGTGCGCTGT
TGTTTGACTCCGGGGAAACCGCCGAGGCGACTCGCCTTAAACGTACAGCACGTCGCCGGTACACTCGGCGTAAGAAT
CGCATTTGCTATTTGCAGGAAATCTTTAGCAACGAGATGGCAAAAGTCGATGACTCGTTTTTCCACCGCCTCGAGGA
AAGCTTTCTGGTGGAGGAAGACAAAAAGCATGAGCGTCACCCGATCTTCGGCAACATTGTCGATGAAGTAGCGTATC
ATGAAAAATACCCAACCATTTACCACTTACGCAAAAAGCTGGTGGACAGCACTGACAAAGCTGATTTGCGCCTTATC
TATTTAGCCCTGGCACATATGATTAAGTTTCGTGGTCACTTCCTGATCGAAGGAGACTTAAATCCCGACAACAGTGA
TGTTGATAAATTGTTTATTCAGCTTGTCCAAACTTACAATCAACTGTTCGAGGAAAACCCGATCAATGCCTCCGGTG
TGGATGCAAAAGCCATTTTAAGTGCACGCCTTAGCAAGTCCCGTCGCTTAGAAAACCTTATCGCGCAGCTGCCCGGC
GAGAAAAAGAATGGTTTGTTTGGGAACCTTATTGCCTTGAGCTTAGGCCTCACCCCGAATTTCAAAAGTAATTTCGA
TCTTGCAGAAGACGCCAAATTACAACTGTCGAAGGATACTTATGATGACGATCTCGATAATCTGTTAGCGCAGATTG
GTGACCAATACGCCGATCTTTTTCTGGCGGCTAAAAATCTGAGCGACGCCATCTTGCTTTCGGATATTCTCCGCGTT
AACACCGAAATCACGAAAGCGCCTCTTAGTGCCAGCATGATTAAACGTTATGATGAACACCACCAGGACCTGACCTT
ACTCAAAGCGTTGGTTCGCCAGCAACTGCCAGAGAAGTACAAAGAAATCTTCTTTGATCAGTCAAAGAATGGTTATG
CCGGCTATATTGACGGGGGTGCAAGCCAAGAGGAATTCTACAAATTTATCAAGCCTATTCTGGAGAAAATGGATGGC
ACCGAAGAGTTATTGGTGAAGCTTAACCGTGAAGACCTCCTGCGGAAACAGCGCACATTCGATAATGGTTCGATCCC
ACACCAAATCCATTTGGGGGAGTTACACGCTATTTTGCGTCGCCAGGAAGACTTTTACCCTTTCCTGAAGGATAACC
GGGAGAAAATTGAGAAGATCCTTACCTTTCGTATTCCGTATTACGTAGGCCCCTTAGCACGGGGTAATAGCCGTTTC
GCGTGGATGACACGGAAGTCGGAAGAGACGATCACCCCGTGGAACTTCGAAGAGGTAGTCGACAAGGGCGCATCAGC
GCAGTCTTTTATTGAACGTATGACGAATTTCGATAAAAACTTGCCCAATGAGAAGGTGCTTCCGAAACATTCCTTGT
TATATGAATATTTTACAGTTTACAACGAGCTGACCAAGGTTAAATACGTGACGGAAGGAATGCGCAAGCCCGCTTTT
CTTAGCGGTGAGCAAAAAAAGGCGATCGTCGACCTGTTATTCAAAACGAATCGTAAGGTGACTGTAAAGCAACTCAA
AGAAGATTACTTCAAAAAGATTGAGTGCTTCGACAGCGTCGAAATCTCTGGGGTAGAGGATCGGTTTAACGCAAGTT
TAGGTACCTACCATGACCTGCTTAAAATCATTAAGGATAAAGACTTCTTAGATAATGAAGAGAACGAAGATATTCTC
GAGGACATCGTCTTGACGTTAACCTTATTTGAGGATCGTGAAATGATTGAGGAACGCCTCAAAACTTATGCCCACCT
GTTCGACGATAAGGTGATGAAGCAGCTGAAACGTCGGCGCTACACAGGATGGGGCCGCTTGAGTCGCAAACTTATTA
ACGGAATCCGTGACAAGCAATCCGGCAAAACGATTCTGGATTTCTTGAAGTCGGACGGATTTGCTAATCGCAACTTC
ATGCAGTTGATCCATGATGACTCCCTGACTTTTAAAGAGGATATTCAAAAGGCGCAGGTTAGTGGTCAAGGCGACAG
CTTACACGAACACATCGCAAATTTGGCTGGTTCGCCGGCCATTAAAAAGGGGATCCTCCAGACCGTGAAAGTTGTAG
ATGAGCTTGTTAAGGTCATGGGTCGTCATAAGCCCGAAAACATCGTGATTGAAATGGCGCGGGAGAATCAAACGACC
CAGAAAGGACAAAAGAATAGCCGTGAACGGATGAAGCGGATCGAGGAAGGCATTAAAGAGCTGGGGTCTCAAATCTT
GAAGGAACACCCTGTGGAGAACACTCAGCTCCAAAATGAAAAACTTTACCTGTACTATTTGCAGAACGGACGCGATA
TGTACGTGGACCAAGAGTTGGATATTAATCGGCTGAGTGACTACGACGTTGATCATATCGTCCCGCAGAGCTTCCTC
AAAGACGATTCTATTGACAATAAGGTACTGACGCGCTCTGATAAAAACCGTGGTAAGTCGGACAACGTGCCCTCCGA
AGAGGTTGTGAAAAAGATGAAAAATTATTGGCGCCAGCTTTTAAACGCGAAGCTGATCACACAACGTAAATTCGATA
ATTTGACCAAGGCTGAACGGGGTGGCCTGAGCGAGTTAGATAAGGCAGGATTTATTAAACGCCAGTTAGTGGAGACT
CGTCAAATCACCAAACATGTCGCGCAGATTTTGGACAGCCGGATGAACACCAAGTACGATGAAAATGACAAACTGAT
CCGTGAGGTGAAAGTCATTACTCTGAAGTCCAAATTAGTTAGTGATTTCCGGAAGGACTTTCAATTCTACAAAGTCC
GTGAAATTAATAACTATCATCACGCACATGACGCGTACCTGAATGCAGTGGTTGGGACCGCCCTTATCAAGAAATAT
CCTAAGCTGGAGTCGGAGTTTGTCTATGGCGACTATAAGGTATACGATGTTCGCAAAATGATTGCGAAATCTGAGCA
GGAGATCGGTAAGGCAACCGCAAAATATTTCTTTTACTCAAACATTATGAATTTCTTTAAGACAGAAATCACTCTGG
CCAACGGGGAGATTCGCAAACGTCCGTTGATCGAAACAAACGGCGAGACTGGCGAAATTGTTTGGGACAAAGGGCGT
GATTTCGCGACGGTGCGCAAGGTACTGAGCATGCCTCAAGTCAATATTGTTAAGAAAACCGAAGTGCAGACGGGCGG
GTTTTCCAAGGAAAGCATCTTACCCAAACGTAATTCAGATAAACTTATTGCACGCAAAAAGGACTGGGATCCGAAAA
AGTATGGAGGCTTCGACAGTCCAACCGTAGCCTACTCTGTTCTCGTTGTAGCGAAAGTAGAAAAGGGTAAATCCAAG
AAACTGAAATCTGTCAAGGAGTTGCTTGGAATCACCATTATGGAGCGTAGCTCCTTCGAGAAGAACCCGATTGACTT
TCTGGAAGCCAAAGGATATAAAGAGGTCAAGAAAGATCTTATCATTAAGCTGCCTAAGTATTCACTCTTCGAGCTGG
AAAATGGTCGTAAACGCATGCTCGCTTCTGCCGGCGAGTTGCAGAAGGGCAATGAATTAGCACTTCCATCAAAGTAC
GTTAACTTCCTGTATTTGGCCAGCCATTACGAGAAACTGAAGGGGTCTCCAGAGGACAACGAACAGAAACAATTATT
TGTAGAGCAGCACAAGCATTATCTTGATGAAATCATTGAGCAAATTTCCGAATTCAGTAAACGCGTAATCCTGGCCG
ATGCAAACCTCGACAAGGTGCTGAGCGCTTACAATAAGCATCGCGACAAACCTATCCGTGAGCAGGCTGAAAATATC
ATTCACCTGTTCACATTAACGAACCTGGGCGCTCCGGCCGCTTTTAAATATTTCGACACGACAATCGACCGTAAGCG
CTATACCAGTACGAAAGAAGTGTTGGATGCGACCCTTATTCACCAGTCAATTACAGGATTATATGAGACCCGTATCG
ACCTTAGCCAATTAGGTGGGGATGGAGGCGGAGGATCAGGCGGTGGCGGAAGTGGTGGAGGTGGGTCGGGAGGTGGT
GGTAGCATGGTGAGCAAAGGTGAAGAGGATAATATGGCCATCATCAAAGAATTCATGCGCTTCAAAGTTCATATGGA
AGGTAGCGTTAATGGCCACGAATTTGAAATTGAAGGTGAAGGCGAAGGTCGTCCGTATGAAGGCACCCAGACCGCAA
AACTGAAAGTTACCAAAGGTGGTCCGCTGCCGTTTGCATGGGATATTCTGAGTCCGCAGTTTATGTATGGTAGCAAA
GCCTATGTTAAACATCCGGCAGATATCCCGGATTATCTGAAACTGAGCTTTCCGGAAGGTTTTAAATGGGAACGTGT
GATGAATTTTGAAGATGGTGGTGTTGTTACCGTTACACAGGATAGCAGCCTGCAGGATGGTGAATTTATCTATAAAG
TTAAACTGCGTGGCACGAATTTTCCGAGTGATGGTCCGGTTATGCAGAAAAAAACCATGGGTTGGGAAGCAAGCAGC
GAACGTATGTATCCGGAAGATGGCGCACTGAAAGGTGAAATTAAACAGCGTCTGAAGCTGAAAGATGGCGGTCATTA
TGATGCAGAAGTTAAAACCACCTACAAAGCCAAAAAACCGGTTCAGCTGCCTGGTGCATATAACGTTAACATTAAAC
TGGATATCACCAGCCACAACGAGGATTATACCATTGTTGAACAGTATGAACGTGCAGAAGGTCGCCATAGTACCGGT
GGTATGGATGAACTGTATAAA
(Cas9-GGGGSEAAAKGGGGS(SEQ ID NO: 37)-mCherry chimera DNA sequence)
SEQ ID NO: 370
ATGGACAAAAAGTACTCTATTGGCCTGGATATCGGGACCAACAGCGTCGGGTGGGCTGTTATCACCGACGAGTATAA
AGTACCTTCGAAAAAGTTCAAAGTGCTGGGCAACACCGATCGCCATTCAATCAAAAAGAACTTGATTGGTGCGCTGT
TGTTTGACTCCGGGGAAACCGCCGAGGCGACTCGCCTTAAACGTACAGCACGTCGCCGGTACACTCGGCGTAAGAAT
CGCATTTGCTATTTGCAGGAAATCTTTAGCAACGAGATGGCAAAAGTCGATGACTCGTTTTTCCACCGCCTCGAGGA
AAGCTTTCTGGTGGAGGAAGACAAAAAGCATGAGCGTCACCCGATCTTCGGCAACATTGTCGATGAAGTAGCGTATC
ATGAAAAATACCCAACCATTTACCACTTACGCAAAAAGCTGGTGGACAGCACTGACAAAGCTGATTTGCGCCTTATC
TATTTAGCCCTGGCACATATGATTAAGTTTCGTGGTCACTTCCTGATCGAAGGAGACTTAAATCCCGACAACAGTGA
TGTTGATAAATTGTTTATTCAGCTTGTCCAAACTTACAATCAACTGTTCGAGGAAAACCCGATCAATGCCTCCGGTG
TGGATGCAAAAGCCATTTTAAGTGCACGCCTTAGCAAGTCCCGTCGCTTAGAAAACCTTATCGCGCAGCTGCCCGGC
GAGAAAAAGAATGGTTTGTTTGGGAACCTTATTGCCTTGAGCTTAGGCCTCACCCCGAATTTCAAAAGTAATTTCGA
TCTTGCAGAAGACGCCAAATTACAACTGTCGAAGGATACTTATGATGACGATCTCGATAATCTGTTAGCGCAGATTG
GTGACCAATACGCCGATCTTTTTCTGGCGGCTAAAAATCTGAGCGACGCCATCTTGCTTTCGGATATTCTCCGCGTT
AACACCGAAATCACGAAAGCGCCTCTTAGTGCCAGCATGATTAAACGTTATGATGAACACCACCAGGACCTGACCTT
ACTCAAAGCGTTGGTTCGCCAGCAACTGCCAGAGAAGTACAAAGAAATCTTCTTTGATCAGTCAAAGAATGGTTATG
CCGGCTATATTGACGGGGGTGCAAGCCAAGAGGAATTCTACAAATTTATCAAGCCTATTCTGGAGAAAATGGATGGC
ACCGAAGAGTTATTGGTGAAGCTTAACCGTGAAGACCTCCTGCGGAAACAGCGCACATTCGATAATGGTTCGATCCC
ACACCAAATCCATTTGGGGGAGTTACACGCTATTTTGCGTCGCCAGGAAGACTTTTACCCTTTCCTGAAGGATAACC
GGGAGAAAATTGAGAAGATCCTTACCTTTCGTATTCCGTATTACGTAGGCCCCTTAGCACGGGGTAATAGCCGTTTC
GCGTGGATGACACGGAAGTCGGAAGAGACGATCACCCCGTGGAACTTCGAAGAGGTAGTCGACAAGGGCGCATCAGC
GCAGTCTTTTATTGAACGTATGACGAATTTCGATAAAAACTTGCCCAATGAGAAGGTGCTTCCGAAACATTCCTTGT
TATATGAATATTTTACAGTTTACAACGAGCTGACCAAGGTTAAATACGTGACGGAAGGAATGCGCAAGCCCGCTTTT
CTTAGCGGTGAGCAAAAAAAGGCGATCGTCGACCTGTTATTCAAAACGAATCGTAAGGTGACTGTAAAGCAACTCAA
AGAAGATTACTTCAAAAAGATTGAGTGCTTCGACAGCGTCGAAATCTCTGGGGTAGAGGATCGGTTTAACGCAAGTT
TAGGTACCTACCATGACCTGCTTAAAATCATTAAGGATAAAGACTTCTTAGATAATGAAGAGAACGAAGATATTCTC
GAGGACATCGTCTTGACGTTAACCTTATTTGAGGATCGTGAAATGATTGAGGAACGCCTCAAAACTTATGCCCACCT
GTTCGACGATAAGGTGATGAAGCAGCTGAAACGTCGGCGCTACACAGGATGGGGCCGCTTGAGTCGCAAACTTATTA
ACGGAATCCGTGACAAGCAATCCGGCAAAACGATTCTGGATTTCTTGAAGTCGGACGGATTTGCTAATCGCAACTTC
ATGCAGTTGATCCATGATGACTCCCTGACTTTTAAAGAGGATATTCAAAAGGCGCAGGTTAGTGGTCAAGGCGACAG
CTTACACGAACACATCGCAAATTTGGCTGGTTCGCCGGCCATTAAAAAGGGGATCCTCCAGACCGTGAAAGTTGTAG
ATGAGCTTGTTAAGGTCATGGGTCGTCATAAGCCCGAAAACATCGTGATTGAAATGGCGCGGGAGAATCAAACGACC
CAGAAAGGACAAAAGAATAGCCGTGAACGGATGAAGCGGATCGAGGAAGGCATTAAAGAGCTGGGGTCTCAAATCTT
GAAGGAACACCCTGTGGAGAACACTCAGCTCCAAAATGAAAAACTTTACCTGTACTATTTGCAGAACGGACGCGATA
TGTACGTGGACCAAGAGTTGGATATTAATCGGCTGAGTGACTACGACGTTGATCATATCGTCCCGCAGAGCTTCCTC
AAAGACGATTCTATTGACAATAAGGTACTGACGCGCTCTGATAAAAACCGTGGTAAGTCGGACAACGTGCCCTCCGA
AGAGGTTGTGAAAAAGATGAAAAATTATTGGCGCCAGCTTTTAAACGCGAAGCTGATCACACAACGTAAATTCGATA
ATTTGACCAAGGCTGAACGGGGTGGCCTGAGCGAGTTAGATAAGGCAGGATTTATTAAACGCCAGTTAGTGGAGACT
CGTCAAATCACCAAACATGTCGCGCAGATTTTGGACAGCCGGATGAACACCAAGTACGATGAAAATGACAAACTGAT
CCGTGAGGTGAAAGTCATTACTCTGAAGTCCAAATTAGTTAGTGATTTCCGGAAGGACTTTCAATTCTACAAAGTCC
GTGAAATTAATAACTATCATCACGCACATGACGCGTACCTGAATGCAGTGGTTGGGACCGCCCTTATCAAGAAATAT
CCTAAGCTGGAGTCGGAGTTTGTCTATGGCGACTATAAGGTATACGATGTTCGCAAAATGATTGCGAAATCTGAGCA
GGAGATCGGTAAGGCAACCGCAAAATATTTCTTTTACTCAAACATTATGAATTTCTTTAAGACAGAAATCACTCTGG
CCAACGGGGAGATTCGCAAACGTCCGTTGATCGAAACAAACGGCGAGACTGGCGAAATTGTTTGGGACAAAGGGCGT
GATTTCGCGACGGTGCGCAAGGTACTGAGCATGCCTCAAGTCAATATTGTTAAGAAAACCGAAGTGCAGACGGGCGG
GTTTTCCAAGGAAAGCATCTTACCCAAACGTAATTCAGATAAACTTATTGCACGCAAAAAGGACTGGGATCCGAAAA
AGTATGGAGGCTTCGACAGTCCAACCGTAGCCTACTCTGTTCTCGTTGTAGCGAAAGTAGAAAAGGGTAAATCCAAG
AAACTGAAATCTGTCAAGGAGTTGCTTGGAATCACCATTATGGAGCGTAGCTCCTTCGAGAAGAACCCGATTGACTT
TCTGGAAGCCAAAGGATATAAAGAGGTCAAGAAAGATCTTATCATTAAGCTGCCTAAGTATTCACTCTTCGAGCTGG
AAAATGGTCGTAAACGCATGCTCGCTTCTGCCGGCGAGTTGCAGAAGGGCAATGAATTAGCACTTCCATCAAAGTAC
GTTAACTTCCTGTATTTGGCCAGCCATTACGAGAAACTGAAGGGGTCTCCAGAGGACAACGAACAGAAACAATTATT
TGTAGAGCAGCACAAGCATTATCTTGATGAAATCATTGAGCAAATTTCCGAATTCAGTAAACGCGTAATCCTGGCCG
ATGCAAACCTCGACAAGGTGCTGAGCGCTTACAATAAGCATCGCGACAAACCTATCCGTGAGCAGGCTGAAAATATC
ATTCACCTGTTCACATTAACGAACCTGGGCGCTCCGGCCGCTTTTAAATATTTCGACACGACAATCGACCGTAAGCG
CTATACCAGTACGAAAGAAGTGTTGGATGCGACCCTTATTCACCAGTCAATTACAGGATTATATGAGACCCGTATCG
ACCTTAGCCAATTAGGTGGGGATGGAGGCGGAGGGTCGGAAGCGGCAGCAAAAGGAGGCGGAGGAAGTATGGTGAGC
AAAGGTGAAGAGGATAATATGGCCATCATCAAAGAATTCATGCGCTTCAAAGTTCATATGGAAGGTAGCGTTAATGG
CCACGAATTTGAAATTGAAGGTGAAGGCGAAGGTCGTCCGTATGAAGGCACCCAGACCGCAAAACTGAAAGTTACCA
AAGGTGGTCCGCTGCCGTTTGCATGGGATATTCTGAGTCCGCAGTTTATGTATGGTAGCAAAGCCTATGTTAAACAT
CCGGCAGATATCCCGGATTATCTGAAACTGAGCTTTCCGGAAGGTTTTAAATGGGAACGTGTGATGAATTTTGAAGA
TGGTGGTGTTGTTACCGTTACACAGGATAGCAGCCTGCAGGATGGTGAATTTATCTATAAAGTTAAACTGCGTGGCA
CGAATTTTCCGAGTGATGGTCCGGTTATGCAGAAAAAAACCATGGGTTGGGAAGCAAGCAGCGAACGTATGTATCCG
GAAGATGGCGCACTGAAAGGTGAAATTAAACAGCGTCTGAAGCTGAAAGATGGCGGTCATTATGATGCAGAAGTTAA
AACCACCTACAAAGCCAAAAAACCGGTTCAGCTGCCTGGTGCATATAACGTTAACATTAAACTGGATATCACCAGCC
ACAACGAGGATTATACCATTGTTGAACAGTATGAACGTGCAGAAGGTCGCCATAGTACCGGTGGTATGGATGAACTG
TATAAA
(Cas9-A(EAAAK)₄A(SEQ ID NO: 8)-mCherry chimera DNA sequence)
SEQ ID NO: 371
ATGGACAAAAAGTACTCTATTGGCCTGGATATCGGGACCAACAGCGTCGGGTGGGCTGTTATCACCGACGAGTATAA
AGTACCTTCGAAAAAGTTCAAAGTGCTGGGCAACACCGATCGCCATTCAATCAAAAAGAACTTGATTGGTGCGCTGT
TGTTTGACTCCGGGGAAACCGCCGAGGCGACTCGCCTTAAACGTACAGCACGTCGCCGGTACACTCGGCGTAAGAAT
CGCATTTGCTATTTGCAGGAAATCTTTAGCAACGAGATGGCAAAAGTCGATGACTCGTTTTTCCACCGCCTCGAGGA
AAGCTTTCTGGTGGAGGAAGACAAAAAGCATGAGCGTCACCCGATCTTCGGCAACATTGTCGATGAAGTAGCGTATC
ATGAAAAATACCCAACCATTTACCACTTACGCAAAAAGCTGGTGGACAGCACTGACAAAGCTGATTTGCGCCTTATC
TATTTAGCCCTGGCACATATGATTAAGTTTCGTGGTCACTTCCTGATCGAAGGAGACTTAAATCCCGACAACAGTGA
TGTTGATAAATTGTTTATTCAGCTTGTCCAAACTTACAATCAACTGTTCGAGGAAAACCCGATCAATGCCTCCGGTG
TGGATGCAAAAGCCATTTTAAGTGCACGCCTTAGCAAGTCCCGTCGCTTAGAAAACCTTATCGCGCAGCTGCCCGGC
GAGAAAAAGAATGGTTTGTTTGGGAACCTTATTGCCTTGAGCTTAGGCCTCACCCCGAATTTCAAAAGTAATTTCGA
TCTTGCAGAAGACGCCAAATTACAACTGTCGAAGGATACTTATGATGACGATCTCGATAATCTGTTAGCGCAGATTG
GTGACCAATACGCCGATCTTTTTCTGGCGGCTAAAAATCTGAGCGACGCCATCTTGCTTTCGGATATTCTCCGCGTT
AACACCGAAATCACGAAAGCGCCTCTTAGTGCCAGCATGATTAAACGTTATGATGAACACCACCAGGACCTGACCTT
ACTCAAAGCGTTGGTTCGCCAGCAACTGCCAGAGAAGTACAAAGAAATCTTCTTTGATCAGTCAAAGAATGGTTATG
CCGGCTATATTGACGGGGGTGCAAGCCAAGAGGAATTCTACAAATTTATCAAGCCTATTCTGGAGAAAATGGATGGC
ACCGAAGAGTTATTGGTGAAGCTTAACCGTGAAGACCTCCTGCGGAAACAGCGCACATTCGATAATGGTTCGATCCC
ACACCAAATCCATTTGGGGGAGTTACACGCTATTTTGCGTCGCCAGGAAGACTTTTACCCTTTCCTGAAGGATAACC
GGGAGAAAATTGAGAAGATCCTTACCTTTCGTATTCCGTATTACGTAGGCCCCTTAGCACGGGGTAATAGCCGTTTC
GCGTGGATGACACGGAAGTCGGAAGAGACGATCACCCCGTGGAACTTCGAAGAGGTAGTCGACAAGGGCGCATCAGC
GCAGTCTTTTATTGAACGTATGACGAATTTCGATAAAAACTTGCCCAATGAGAAGGTGCTTCCGAAACATTCCTTGT
TATATGAATATTTTACAGTTTACAACGAGCTGACCAAGGTTAAATACGTGACGGAAGGAATGCGCAAGCCCGCTTTT
CTTAGCGGTGAGCAAAAAAAGGCGATCGTCGACCTGTTATTCAAAACGAATCGTAAGGTGACTGTAAAGCAACTCAA
AGAAGATTACTTCAAAAAGATTGAGTGCTTCGACAGCGTCGAAATCTCTGGGGTAGAGGATCGGTTTAACGCAAGTT
TAGGTACCTACCATGACCTGCTTAAAATCATTAAGGATAAAGACTTCTTAGATAATGAAGAGAACGAAGATATTCTC
GAGGACATCGTCTTGACGTTAACCTTATTTGAGGATCGTGAAATGATTGAGGAACGCCTCAAAACTTATGCCCACCT
GTTCGACGATAAGGTGATGAAGCAGCTGAAACGTCGGCGCTACACAGGATGGGGCCGCTTGAGTCGCAAACTTATTA
ACGGAATCCGTGACAAGCAATCCGGCAAAACGATTCTGGATTTCTTGAAGTCGGACGGATTTGCTAATCGCAACTTC
ATGCAGTTGATCCATGATGACTCCCTGACTTTTAAAGAGGATATTCAAAAGGCGCAGGTTAGTGGTCAAGGCGACAG
CTTACACGAACACATCGCAAATTTGGCTGGTTCGCCGGCCATTAAAAAGGGGATCCTCCAGACCGTGAAAGTTGTAG
ATGAGCTTGTTAAGGTCATGGGTCGTCATAAGCCCGAAAACATCGTGATTGAAATGGCGCGGGAGAATCAAACGACC
CAGAAAGGACAAAAGAATAGCCGTGAACGGATGAAGCGGATCGAGGAAGGCATTAAAGAGCTGGGGTCTCAAATCTT
GAAGGAACACCCTGTGGAGAACACTCAGCTCCAAAATGAAAAACTTTACCTGTACTATTTGCAGAACGGACGCGATA
TGTACGTGGACCAAGAGTTGGATATTAATCGGCTGAGTGACTACGACGTTGATCATATCGTCCCGCAGAGCTTCCTC
AAAGACGATTCTATTGACAATAAGGTACTGACGCGCTCTGATAAAAACCGTGGTAAGTCGGACAACGTGCCCTCCGA
AGAGGTTGTGAAAAAGATGAAAAATTATTGGCGCCAGCTTTTAAACGCGAAGCTGATCACACAACGTAAATTCGATA
ATTTGACCAAGGCTGAACGGGGTGGCCTGAGCGAGTTAGATAAGGCAGGATTTATTAAACGCCAGTTAGTGGAGACT
CGTCAAATCACCAAACATGTCGCGCAGATTTTGGACAGCCGGATGAACACCAAGTACGATGAAAATGACAAACTGAT
CCGTGAGGTGAAAGTCATTACTCTGAAGTCCAAATTAGTTAGTGATTTCCGGAAGGACTTTCAATTCTACAAAGTCC
GTGAAATTAATAACTATCATCACGCACATGACGCGTACCTGAATGCAGTGGTTGGGACCGCCCTTATCAAGAAATAT
CCTAAGCTGGAGTCGGAGTTTGTCTATGGCGACTATAAGGTATACGATGTTCGCAAAATGATTGCGAAATCTGAGCA
GGAGATCGGTAAGGCAACCGCAAAATATTTCTTTTACTCAAACATTATGAATTTCTTTAAGACAGAAATCACTCTGG
CCAACGGGGAGATTCGCAAACGTCCGTTGATCGAAACAAACGGCGAGACTGGCGAAATTGTTTGGGACAAAGGGCGT
GATTTCGCGACGGTGCGCAAGGTACTGAGCATGCCTCAAGTCAATATTGTTAAGAAAACCGAAGTGCAGACGGGCGG
GTTTTCCAAGGAAAGCATCTTACCCAAACGTAATTCAGATAAACTTATTGCACGCAAAAAGGACTGGGATCCGAAAA
AGTATGGAGGCTTCGACAGTCCAACCGTAGCCTACTCTGTTCTCGTTGTAGCGAAAGTAGAAAAGGGTAAATCCAAG
AAACTGAAATCTGTCAAGGAGTTGCTTGGAATCACCATTATGGAGCGTAGCTCCTTCGAGAAGAACCCGATTGACTT
TCTGGAAGCCAAAGGATATAAAGAGGTCAAGAAAGATCTTATCATTAAGCTGCCTAAGTATTCACTCTTCGAGCTGG
AAAATGGTCGTAAACGCATGCTCGCTTCTGCCGGCGAGTTGCAGAAGGGCAATGAATTAGCACTTCCATCAAAGTAC
GTTAACTTCCTGTATTTGGCCAGCCATTACGAGAAACTGAAGGGGTCTCCAGAGGACAACGAACAGAAACAATTATT
TGTAGAGCAGCACAAGCATTATCTTGATGAAATCATTGAGCAAATTTCCGAATTCAGTAAACGCGTAATCCTGGCCG
ATGCAAACCTCGACAAGGTGCTGAGCGCTTACAATAAGCATCGCGACAAACCTATCCGTGAGCAGGCTGAAAATATC
ATTCACCTGTTCACATTAACGAACCTGGGCGCTCCGGCCGCTTTTAAATATTTCGACACGACAATCGACCGTAAGCG
CTATACCAGTACGAAAGAAGTGTTGGATGCGACCCTTATTCACCAGTCAATTACAGGATTATATGAGACCCGTATCG
ACCTTAGCCAATTAGGTGGGGATGCTGAGGCCGCAGCAAAAGAGGCTGCCGCTAAGGAGGCTGCTGCAAAAGAAGCA
GCAGCGAAAGCTATGGTGAGCAAAGGTGAAGAGGATAATATGGCCATCATCAAAGAATTCATGCGCTTCAAAGTTCA
TATGGAAGGTAGCGTTAATGGCCACGAATTTGAAATTGAAGGTGAAGGCGAAGGTCGTCCGTATGAAGGCACCCAGA
CCGCAAAACTGAAAGTTACCAAAGGTGGTCCGCTGCCGTTTGCATGGGATATTCTGAGTCCGCAGTTTATGTATGGT
AGCAAAGCCTATGTTAAACATCCGGCAGATATCCCGGATTATCTGAAACTGAGCTTTCCGGAAGGTTTTAAATGGGA
ACGTGTGATGAATTTTGAAGATGGTGGTGTTGTTACCGTTACACAGGATAGCAGCCTGCAGGATGGTGAATTTATCT
ATAAAGTTAAACTGCGTGGCACGAATTTTCCGAGTGATGGTCCGGTTATGCAGAAAAAAACCATGGGTTGGGAAGCA
AGCAGCGAACGTATGTATCCGGAAGATGGCGCACTGAAAGGTGAAATTAAACAGCGTCTGAAGCTGAAAGATGGCGG
TCATTATGATGCAGAAGTTAAAACCACCTACAAAGCCAAAAAACCGGTTCAGCTGCCTGGTGCATATAACGTTAACA
TTAAACTGGATATCACCAGCCACAACGAGGATTATACCATTGTTGAACAGTATGAACGTGCAGAAGGTCGCCATAGT
ACCGGTGGTATGGATGAACTGTATAAA
(Cas9-A(EAAAK)₄ALEA(EAAAK)₄A(SEQ ID NO: 9)-mCherry chimera DNA sequence)
SEQ ID NO: 372
ATGGACAAAAAGTACTCTATTGGCCTGGATATCGGGACCAACAGCGTCGGGTGGGCTGTTATCACCGACGAGTATAA
AGTACCTTCGAAAAAGTTCAAAGTGCTGGGCAACACCGATCGCCATTCAATCAAAAAGAACTTGATTGGTGCGCTGT
TGTTTGACTCCGGGGAAACCGCCGAGGCGACTCGCCTTAAACGTACAGCACGTCGCCGGTACACTCGGCGTAAGAAT
CGCATTTGCTATTTGCAGGAAATCTTTAGCAACGAGATGGCAAAAGTCGATGACTCGTTTTTCCACCGCCTCGAGGA
AAGCTTTCTGGTGGAGGAAGACAAAAAGCATGAGCGTCACCCGATCTTCGGCAACATTGTCGATGAAGTAGCGTATC
ATGAAAAATACCCAACCATTTACCACTTACGCAAAAAGCTGGTGGACAGCACTGACAAAGCTGATTTGCGCCTTATC
TATTTAGCCCTGGCACATATGATTAAGTTTCGTGGTCACTTCCTGATCGAAGGAGACTTAAATCCCGACAACAGTGA
TGTTGATAAATTGTTTATTCAGCTTGTCCAAACTTACAATCAACTGTTCGAGGAAAACCCGATCAATGCCTCCGGTG
TGGATGCAAAAGCCATTTTAAGTGCACGCCTTAGCAAGTCCCGTCGCTTAGAAAACCTTATCGCGCAGCTGCCCGGC
GAGAAAAAGAATGGTTTGTTTGGGAACCTTATTGCCTTGAGCTTAGGCCTCACCCCGAATTTCAAAAGTAATTTCGA
TCTTGCAGAAGACGCCAAATTACAACTGTCGAAGGATACTTATGATGACGATCTCGATAATCTGTTAGCGCAGATTG
GTGACCAATACGCCGATCTTTTTCTGGCGGCTAAAAATCTGAGCGACGCCATCTTGCTTTCGGATATTCTCCGCGTT
AACACCGAAATCACGAAAGCGCCTCTTAGTGCCAGCATGATTAAACGTTATGATGAACACCACCAGGACCTGACCTT
ACTCAAAGCGTTGGTTCGCCAGCAACTGCCAGAGAAGTACAAAGAAATCTTCTTTGATCAGTCAAAGAATGGTTATG
CCGGCTATATTGACGGGGGTGCAAGCCAAGAGGAATTCTACAAATTTATCAAGCCTATTCTGGAGAAAATGGATGGC
ACCGAAGAGTTATTGGTGAAGCTTAACCGTGAAGACCTCCTGCGGAAACAGCGCACATTCGATAATGGTTCGATCCC
ACACCAAATCCATTTGGGGGAGTTACACGCTATTTTGCGTCGCCAGGAAGACTTTTACCCTTTCCTGAAGGATAACC
GGGAGAAAATTGAGAAGATCCTTACCTTTCGTATTCCGTATTACGTAGGCCCCTTAGCACGGGGTAATAGCCGTTTC
GCGTGGATGACACGGAAGTCGGAAGAGACGATCACCCCGTGGAACTTCGAAGAGGTAGTCGACAAGGGCGCATCAGC
GCAGTCTTTTATTGAACGTATGACGAATTTCGATAAAAACTTGCCCAATGAGAAGGTGCTTCCGAAACATTCCTTGT
TATATGAATATTTTACAGTTTACAACGAGCTGACCAAGGTTAAATACGTGACGGAAGGAATGCGCAAGCCCGCTTTT
CTTAGCGGTGAGCAAAAAAAGGCGATCGTCGACCTGTTATTCAAAACGAATCGTAAGGTGACTGTAAAGCAACTCAA
AGAAGATTACTTCAAAAAGATTGAGTGCTTCGACAGCGTCGAAATCTCTGGGGTAGAGGATCGGTTTAACGCAAGTT
TAGGTACCTACCATGACCTGCTTAAAATCATTAAGGATAAAGACTTCTTAGATAATGAAGAGAACGAAGATATTCTC
GAGGACATCGTCTTGACGTTAACCTTATTTGAGGATCGTGAAATGATTGAGGAACGCCTCAAAACTTATGCCCACCT
GTTCGACGATAAGGTGATGAAGCAGCTGAAACGTCGGCGCTACACAGGATGGGGCCGCTTGAGTCGCAAACTTATTA
ACGGAATCCGTGACAAGCAATCCGGCAAAACGATTCTGGATTTCTTGAAGTCGGACGGATTTGCTAATCGCAACTTC
ATGCAGTTGATCCATGATGACTCCCTGACTTTTAAAGAGGATATTCAAAAGGCGCAGGTTAGTGGTCAAGGCGACAG
CTTACACGAACACATCGCAAATTTGGCTGGTTCGCCGGCCATTAAAAAGGGGATCCTCCAGACCGTGAAAGTTGTAG
ATGAGCTTGTTAAGGTCATGGGTCGTCATAAGCCCGAAAACATCGTGATTGAAATGGCGCGGGAGAATCAAACGACC
CAGAAAGGACAAAAGAATAGCCGTGAACGGATGAAGCGGATCGAGGAAGGCATTAAAGAGCTGGGGTCTCAAATCTT
GAAGGAACACCCTGTGGAGAACACTCAGCTCCAAAATGAAAAACTTTACCTGTACTATTTGCAGAACGGACGCGATA
TGTACGTGGACCAAGAGTTGGATATTAATCGGCTGAGTGACTACGACGTTGATCATATCGTCCCGCAGAGCTTCCTC
AAAGACGATTCTATTGACAATAAGGTACTGACGCGCTCTGATAAAAACCGTGGTAAGTCGGACAACGTGCCCTCCGA
AGAGGTTGTGAAAAAGATGAAAAATTATTGGCGCCAGCTTTTAAACGCGAAGCTGATCACACAACGTAAATTCGATA
ATTTGACCAAGGCTGAACGGGGTGGCCTGAGCGAGTTAGATAAGGCAGGATTTATTAAACGCCAGTTAGTGGAGACT
CGTCAAATCACCAAACATGTCGCGCAGATTTTGGACAGCCGGATGAACACCAAGTACGATGAAAATGACAAACTGAT
CCGTGAGGTGAAAGTCATTACTCTGAAGTCCAAATTAGTTAGTGATTTCCGGAAGGACTTTCAATTCTACAAAGTCC
GTGAAATTAATAACTATCATCACGCACATGACGCGTACCTGAATGCAGTGGTTGGGACCGCCCTTATCAAGAAATAT
CCTAAGCTGGAGTCGGAGTTTGTCTATGGCGACTATAAGGTATACGATGTTCGCAAAATGATTGCGAAATCTGAGCA
GGAGATCGGTAAGGCAACCGCAAAATATTTCTTTTACTCAAACATTATGAATTTCTTTAAGACAGAAATCACTCTGG
CCAACGGGGAGATTCGCAAACGTCCGTTGATCGAAACAAACGGCGAGACTGGCGAAATTGTTTGGGACAAAGGGCGT
GATTTCGCGACGGTGCGCAAGGTACTGAGCATGCCTCAAGTCAATATTGTTAAGAAAACCGAAGTGCAGACGGGCGG
GTTTTCCAAGGAAAGCATCTTACCCAAACGTAATTCAGATAAACTTATTGCACGCAAAAAGGACTGGGATCCGAAAA
AGTATGGAGGCTTCGACAGTCCAACCGTAGCCTACTCTGTTCTCGTTGTAGCGAAAGTAGAAAAGGGTAAATCCAAG
AAACTGAAATCTGTCAAGGAGTTGCTTGGAATCACCATTATGGAGCGTAGCTCCTTCGAGAAGAACCCGATTGACTT
TCTGGAAGCCAAAGGATATAAAGAGGTCAAGAAAGATCTTATCATTAAGCTGCCTAAGTATTCACTCTTCGAGCTGG
AAAATGGTCGTAAACGCATGCTCGCTTCTGCCGGCGAGTTGCAGAAGGGCAATGAATTAGCACTTCCATCAAAGTAC
GTTAACTTCCTGTATTTGGCCAGCCATTACGAGAAACTGAAGGGGTCTCCAGAGGACAACGAACAGAAACAATTATT
TGTAGAGCAGCACAAGCATTATCTTGATGAAATCATTGAGCAAATTTCCGAATTCAGTAAACGCGTAATCCTGGCCG
ATGCAAACCTCGACAAGGTGCTGAGCGCTTACAATAAGCATCGCGACAAACCTATCCGTGAGCAGGCTGAAAATATC
ATTCACCTGTTCACATTAACGAACCTGGGCGCTCCGGCCGCTTTTAAATATTTCGACACGACAATCGACCGTAAGCG
CTATACCAGTACGAAAGAAGTGTTGGATGCGACCCTTATTCACCAGTCAATTACAGGATTATATGAGACCCGTATCG
ACCTTAGCCAATTAGGTGGGGATGCCGAAGCAGCAGCCAAAGAAGCTGCCGCAAAGGAGGCGGCAGCTAAAGAAGCG
GCCGCTAAGGCATTGGAAGCGGAGGCGGCTGCCAAGGAGGCTGCGGCGAAAGAAGCTGCGGCCAAAGAAGCGGCTGC
AAAAGCGATGGTGAGCAAAGGTGAAGAGGATAATATGGCCATCATCAAAGAATTCATGCGCTTCAAAGTTCATATGG
AAGGTAGCGTTAATGGCCACGAATTTGAAATTGAAGGTGAAGGCGAAGGTCGTCCGTATGAAGGCACCCAGACCGCA
AAACTGAAAGTTACCAAAGGTGGTCCGCTGCCGTTTGCATGGGATATTCTGAGTCCGCAGTTTATGTATGGTAGCAA
AGCCTATGTTAAACATCCGGCAGATATCCCGGATTATCTGAAACTGAGCTTTCCGGAAGGTTTTAAATGGGAACGTG
TGATGAATTTTGAAGATGGTGGTGTTGTTACCGTTACACAGGATAGCAGCCTGCAGGATGGTGAATTTATCTATAAA
GTTAAACTGCGTGGCACGAATTTTCCGAGTGATGGTCCGGTTATGCAGAAAAAAACCATGGGTTGGGAAGCAAGCAG
CGAACGTATGTATCCGGAAGATGGCGCACTGAAAGGTGAAATTAAACAGCGTCTGAAGCTGAAAGATGGCGGTCATT
ATGATGCAGAAGTTAAAACCACCTACAAAGCCAAAAAACCGGTTCAGCTGCCTGGTGCATATAACGTTAACATTAAA
CTGGATATCACCAGCCACAACGAGGATTATACCATTGTTGAACAGTATGAACGTGCAGAAGGTCGCCATAGTACCGG
TGGTATGGATGAACTGTATAAA
(Cas9-LEA(EAAAK)₄ALEA(EAAAK)₄ALE(SEQ ID NO: 10)-mCherry chimera DNA sequence)
SEQ ID NO: 373
ATGGACAAAAAGTACTCTATTGGCCTGGATATCGGGACCAACAGCGTCGGGTGGGCTGTTATCACCGACGAGTATAA
AGTACCTTCGAAAAAGTTCAAAGTGCTGGGCAACACCGATCGCCATTCAATCAAAAAGAACTTGATTGGTGCGCTGT
TGTTTGACTCCGGGGAAACCGCCGAGGCGACTCGCCTTAAACGTACAGCACGTCGCCGGTACACTCGGCGTAAGAAT
CGCATTTGCTATTTGCAGGAAATCTTTAGCAACGAGATGGCAAAAGTCGATGACTCGTTTTTCCACCGCCTCGAGGA
AAGCTTTCTGGTGGAGGAAGACAAAAAGCATGAGCGTCACCCGATCTTCGGCAACATTGTCGATGAAGTAGCGTATC
ATGAAAAATACCCAACCATTTACCACTTACGCAAAAAGCTGGTGGACAGCACTGACAAAGCTGATTTGCGCCTTATC
TATTTAGCCCTGGCACATATGATTAAGTTTCGTGGTCACTTCCTGATCGAAGGAGACTTAAATCCCGACAACAGTGA
TGTTGATAAATTGTTTATTCAGCTTGTCCAAACTTACAATCAACTGTTCGAGGAAAACCCGATCAATGCCTCCGGTG
TGGATGCAAAAGCCATTTTAAGTGCACGCCTTAGCAAGTCCCGTCGCTTAGAAAACCTTATCGCGCAGCTGCCCGGC
GAGAAAAAGAATGGTTTGTTTGGGAACCTTATTGCCTTGAGCTTAGGCCTCACCCCGAATTTCAAAAGTAATTTCGA
TCTTGCAGAAGACGCCAAATTACAACTGTCGAAGGATACTTATGATGACGATCTCGATAATCTGTTAGCGCAGATTG
GTGACCAATACGCCGATCTTTTTCTGGCGGCTAAAAATCTGAGCGACGCCATCTTGCTTTCGGATATTCTCCGCGTT
AACACCGAAATCACGAAAGCGCCTCTTAGTGCCAGCATGATTAAACGTTATGATGAACACCACCAGGACCTGACCTT
ACTCAAAGCGTTGGTTCGCCAGCAACTGCCAGAGAAGTACAAAGAAATCTTCTTTGATCAGTCAAAGAATGGTTATG
CCGGCTATATTGACGGGGGTGCAAGCCAAGAGGAATTCTACAAATTTATCAAGCCTATTCTGGAGAAAATGGATGGC
ACCGAAGAGTTATTGGTGAAGCTTAACCGTGAAGACCTCCTGCGGAAACAGCGCACATTCGATAATGGTTCGATCCC
ACACCAAATCCATTTGGGGGAGTTACACGCTATTTTGCGTCGCCAGGAAGACTTTTACCCTTTCCTGAAGGATAACC
GGGAGAAAATTGAGAAGATCCTTACCTTTCGTATTCCGTATTACGTAGGCCCCTTAGCACGGGGTAATAGCCGTTTC
GCGTGGATGACACGGAAGTCGGAAGAGACGATCACCCCGTGGAACTTCGAAGAGGTAGTCGACAAGGGCGCATCAGC
GCAGTCTTTTATTGAACGTATGACGAATTTCGATAAAAACTTGCCCAATGAGAAGGTGCTTCCGAAACATTCCTTGT
TATATGAATATTTTACAGTTTACAACGAGCTGACCAAGGTTAAATACGTGACGGAAGGAATGCGCAAGCCCGCTTTT
CTTAGCGGTGAGCAAAAAAAGGCGATCGTCGACCTGTTATTCAAAACGAATCGTAAGGTGACTGTAAAGCAACTCAA
AGAAGATTACTTCAAAAAGATTGAGTGCTTCGACAGCGTCGAAATCTCTGGGGTAGAGGATCGGTTTAACGCAAGTT
TAGGTACCTACCATGACCTGCTTAAAATCATTAAGGATAAAGACTTCTTAGATAATGAAGAGAACGAAGATATTCTC
GAGGACATCGTCTTGACGTTAACCTTATTTGAGGATCGTGAAATGATTGAGGAACGCCTCAAAACTTATGCCCACCT
GTTCGACGATAAGGTGATGAAGCAGCTGAAACGTCGGCGCTACACAGGATGGGGCCGCTTGAGTCGCAAACTTATTA
ACGGAATCCGTGACAAGCAATCCGGCAAAACGATTCTGGATTTCTTGAAGTCGGACGGATTTGCTAATCGCAACTTC
ATGCAGTTGATCCATGATGACTCCCTGACTTTTAAAGAGGATATTCAAAAGGCGCAGGTTAGTGGTCAAGGCGACAG
CTTACACGAACACATCGCAAATTTGGCTGGTTCGCCGGCCATTAAAAAGGGGATCCTCCAGACCGTGAAAGTTGTAG
ATGAGCTTGTTAAGGTCATGGGTCGTCATAAGCCCGAAAACATCGTGATTGAAATGGCGCGGGAGAATCAAACGACC
CAGAAAGGACAAAAGAATAGCCGTGAACGGATGAAGCGGATCGAGGAAGGCATTAAAGAGCTGGGGTCTCAAATCTT
GAAGGAACACCCTGTGGAGAACACTCAGCTCCAAAATGAAAAACTTTACCTGTACTATTTGCAGAACGGACGCGATA
TGTACGTGGACCAAGAGTTGGATATTAATCGGCTGAGTGACTACGACGTTGATCATATCGTCCCGCAGAGCTTCCTC
AAAGACGATTCTATTGACAATAAGGTACTGACGCGCTCTGATAAAAACCGTGGTAAGTCGGACAACGTGCCCTCCGA
AGAGGTTGTGAAAAAGATGAAAAATTATTGGCGCCAGCTTTTAAACGCGAAGCTGATCACACAACGTAAATTCGATA
ATTTGACCAAGGCTGAACGGGGTGGCCTGAGCGAGTTAGATAAGGCAGGATTTATTAAACGCCAGTTAGTGGAGACT
CGTCAAATCACCAAACATGTCGCGCAGATTTTGGACAGCCGGATGAACACCAAGTACGATGAAAATGACAAACTGAT
CCGTGAGGTGAAAGTCATTACTCTGAAGTCCAAATTAGTTAGTGATTTCCGGAAGGACTTTCAATTCTACAAAGTCC
GTGAAATTAATAACTATCATCACGCACATGACGCGTACCTGAATGCAGTGGTTGGGACCGCCCTTATCAAGAAATAT
CCTAAGCTGGAGTCGGAGTTTGTCTATGGCGACTATAAGGTATACGATGTTCGCAAAATGATTGCGAAATCTGAGCA
GGAGATCGGTAAGGCAACCGCAAAATATTTCTTTTACTCAAACATTATGAATTTCTTTAAGACAGAAATCACTCTGG
CCAACGGGGAGATTCGCAAACGTCCGTTGATCGAAACAAACGGCGAGACTGGCGAAATTGTTTGGGACAAAGGGCGT
GATTTCGCGACGGTGCGCAAGGTACTGAGCATGCCTCAAGTCAATATTGTTAAGAAAACCGAAGTGCAGACGGGCGG
GTTTTCCAAGGAAAGCATCTTACCCAAACGTAATTCAGATAAACTTATTGCACGCAAAAAGGACTGGGATCCGAAAA
AGTATGGAGGCTTCGACAGTCCAACCGTAGCCTACTCTGTTCTCGTTGTAGCGAAAGTAGAAAAGGGTAAATCCAAG
AAACTGAAATCTGTCAAGGAGTTGCTTGGAATCACCATTATGGAGCGTAGCTCCTTCGAGAAGAACCCGATTGACTT
TCTGGAAGCCAAAGGATATAAAGAGGTCAAGAAAGATCTTATCATTAAGCTGCCTAAGTATTCACTCTTCGAGCTGG
AAAATGGTCGTAAACGCATGCTCGCTTCTGCCGGCGAGTTGCAGAAGGGCAATGAATTAGCACTTCCATCAAAGTAC
GTTAACTTCCTGTATTTGGCCAGCCATTACGAGAAACTGAAGGGGTCTCCAGAGGACAACGAACAGAAACAATTATT
TGTAGAGCAGCACAAGCATTATCTTGATGAAATCATTGAGCAAATTTCCGAATTCAGTAAACGCGTAATCCTGGCCG
ATGCAAACCTCGACAAGGTGCTGAGCGCTTACAATAAGCATCGCGACAAACCTATCCGTGAGCAGGCTGAAAATATC
ATTCACCTGTTCACATTAACGAACCTGGGCGCTCCGGCCGCTTTTAAATATTTCGACACGACAATCGACCGTAAGCG
CTATACCAGTACGAAAGAAGTGTTGGATGCGACCCTTATTCACCAGTCAATTACAGGATTATATGAGACCCGTATCG
ACCTTAGCCAATTAGGTGGGGATTTAGAGGCTGAGGCTGCTGCCAAGGAGGCTGCTGCGAAGGAAGCTGCAGCTAAA
GAGGCAGCGGCCAAAGCACTTGAGGCCGAAGCCGCCGCGAAAGAAGCCGCTGCTAAGGAGGCAGCCGCCAAAGAAGC
GGCAGCTAAAGCATTAGAAATGGTGAGCAAAGGTGAAGAGGATAATATGGCCATCATCAAAGAATTCATGCGCTTCA
AAGTTCATATGGAAGGTAGCGTTAATGGCCACGAATTTGAAATTGAAGGTGAAGGCGAAGGTCGTCCGTATGAAGGC
ACCCAGACCGCAAAACTGAAAGTTACCAAAGGTGGTCCGCTGCCGTTTGCATGGGATATTCTGAGTCCGCAGTTTAT
GTATGGTAGCAAAGCCTATGTTAAACATCCGGCAGATATCCCGGATTATCTGAAACTGAGCTTTCCGGAAGGTTTTA
AATGGGAACGTGTGATGAATTTTGAAGATGGTGGTGTTGTTACCGTTACACAGGATAGCAGCCTGCAGGATGGTGAA
TTTATCTATAAAGTTAAACTGCGTGGCACGAATTTTCCGAGTGATGGTCCGGTTATGCAGAAAAAAACCATGGGTTG
GGAAGCAAGCAGCGAACGTATGTATCCGGAAGATGGCGCACTGAAAGGTGAAATTAAACAGCGTCTGAAGCTGAAAG
ATGGCGGTCATTATGATGCAGAAGTTAAAACCACCTACAAAGCCAAAAAACCGGTTCAGCTGCCTGGTGCATATAAC
GTTAACATTAAACTGGATATCACCAGCCACAACGAGGATTATACCATTGTTGAACAGTATGAACGTGCAGAAGGTCG
CCATAGTACCGGTGGTATGGATGAACTGTATAAA
(Cas9-APA-mCherry chimera DNA sequence)
SEQ ID NO: 374
ATGGACAAAAAGTACTCTATTGGCCTGGATATCGGGACCAACAGCGTCGGGTGGGCTGTTATCACCGACGAGTATAA
AGTACCTTCGAAAAAGTTCAAAGTGCTGGGCAACACCGATCGCCATTCAATCAAAAAGAACTTGATTGGTGCGCTGT
TGTTTGACTCCGGGGAAACCGCCGAGGCGACTCGCCTTAAACGTACAGCACGTCGCCGGTACACTCGGCGTAAGAAT
CGCATTTGCTATTTGCAGGAAATCTTTAGCAACGAGATGGCAAAAGTCGATGACTCGTTTTTCCACCGCCTCGAGGA
AAGCTTTCTGGTGGAGGAAGACAAAAAGCATGAGCGTCACCCGATCTTCGGCAACATTGTCGATGAAGTAGCGTATC
ATGAAAAATACCCAACCATTTACCACTTACGCAAAAAGCTGGTGGACAGCACTGACAAAGCTGATTTGCGCCTTATC
TATTTAGCCCTGGCACATATGATTAAGTTTCGTGGTCACTTCCTGATCGAAGGAGACTTAAATCCCGACAACAGTGA
TGTTGATAAATTGTTTATTCAGCTTGTCCAAACTTACAATCAACTGTTCGAGGAAAACCCGATCAATGCCTCCGGTG
TGGATGCAAAAGCCATTTTAAGTGCACGCCTTAGCAAGTCCCGTCGCTTAGAAAACCTTATCGCGCAGCTGCCCGGC
GAGAAAAAGAATGGTTTGTTTGGGAACCTTATTGCCTTGAGCTTAGGCCTCACCCCGAATTTCAAAAGTAATTTCGA
TCTTGCAGAAGACGCCAAATTACAACTGTCGAAGGATACTTATGATGACGATCTCGATAATCTGTTAGCGCAGATTG
GTGACCAATACGCCGATCTTTTTCTGGCGGCTAAAAATCTGAGCGACGCCATCTTGCTTTCGGATATTCTCCGCGTT
AACACCGAAATCACGAAAGCGCCTCTTAGTGCCAGCATGATTAAACGTTATGATGAACACCACCAGGACCTGACCTT
ACTCAAAGCGTTGGTTCGCCAGCAACTGCCAGAGAAGTACAAAGAAATCTTCTTTGATCAGTCAAAGAATGGTTATG
CCGGCTATATTGACGGGGGTGCAAGCCAAGAGGAATTCTACAAATTTATCAAGCCTATTCTGGAGAAAATGGATGGC
ACCGAAGAGTTATTGGTGAAGCTTAACCGTGAAGACCTCCTGCGGAAACAGCGCACATTCGATAATGGTTCGATCCC
ACACCAAATCCATTTGGGGGAGTTACACGCTATTTTGCGTCGCCAGGAAGACTTTTACCCTTTCCTGAAGGATAACC
GGGAGAAAATTGAGAAGATCCTTACCTTTCGTATTCCGTATTACGTAGGCCCCTTAGCACGGGGTAATAGCCGTTTC
GCGTGGATGACACGGAAGTCGGAAGAGACGATCACCCCGTGGAACTTCGAAGAGGTAGTCGACAAGGGCGCATCAGC
GCAGTCTTTTATTGAACGTATGACGAATTTCGATAAAAACTTGCCCAATGAGAAGGTGCTTCCGAAACATTCCTTGT
TATATGAATATTTTACAGTTTACAACGAGCTGACCAAGGTTAAATACGTGACGGAAGGAATGCGCAAGCCCGCTTTT
CTTAGCGGTGAGCAAAAAAAGGCGATCGTCGACCTGTTATTCAAAACGAATCGTAAGGTGACTGTAAAGCAACTCAA
AGAAGATTACTTCAAAAAGATTGAGTGCTTCGACAGCGTCGAAATCTCTGGGGTAGAGGATCGGTTTAACGCAAGTT
TAGGTACCTACCATGACCTGCTTAAAATCATTAAGGATAAAGACTTCTTAGATAATGAAGAGAACGAAGATATTCTC
GAGGACATCGTCTTGACGTTAACCTTATTTGAGGATCGTGAAATGATTGAGGAACGCCTCAAAACTTATGCCCACCT
GTTCGACGATAAGGTGATGAAGCAGCTGAAACGTCGGCGCTACACAGGATGGGGCCGCTTGAGTCGCAAACTTATTA
ACGGAATCCGTGACAAGCAATCCGGCAAAACGATTCTGGATTTCTTGAAGTCGGACGGATTTGCTAATCGCAACTTC
ATGCAGTTGATCCATGATGACTCCCTGACTTTTAAAGAGGATATTCAAAAGGCGCAGGTTAGTGGTCAAGGCGACAG
CTTACACGAACACATCGCAAATTTGGCTGGTTCGCCGGCCATTAAAAAGGGGATCCTCCAGACCGTGAAAGTTGTAG
ATGAGCTTGTTAAGGTCATGGGTCGTCATAAGCCCGAAAACATCGTGATTGAAATGGCGCGGGAGAATCAAACGACC
CAGAAAGGACAAAAGAATAGCCGTGAACGGATGAAGCGGATCGAGGAAGGCATTAAAGAGCTGGGGTCTCAAATCTT
GAAGGAACACCCTGTGGAGAACACTCAGCTCCAAAATGAAAAACTTTACCTGTACTATTTGCAGAACGGACGCGATA
TGTACGTGGACCAAGAGTTGGATATTAATCGGCTGAGTGACTACGACGTTGATCATATCGTCCCGCAGAGCTTCCTC
AAAGACGATTCTATTGACAATAAGGTACTGACGCGCTCTGATAAAAACCGTGGTAAGTCGGACAACGTGCCCTCCGA
AGAGGTTGTGAAAAAGATGAAAAATTATTGGCGCCAGCTTTTAAACGCGAAGCTGATCACACAACGTAAATTCGATA
ATTTGACCAAGGCTGAACGGGGTGGCCTGAGCGAGTTAGATAAGGCAGGATTTATTAAACGCCAGTTAGTGGAGACT
CGTCAAATCACCAAACATGTCGCGCAGATTTTGGACAGCCGGATGAACACCAAGTACGATGAAAATGACAAACTGAT
CCGTGAGGTGAAAGTCATTACTCTGAAGTCCAAATTAGTTAGTGATTTCCGGAAGGACTTTCAATTCTACAAAGTCC
GTGAAATTAATAACTATCATCACGCACATGACGCGTACCTGAATGCAGTGGTTGGGACCGCCCTTATCAAGAAATAT
CCTAAGCTGGAGTCGGAGTTTGTCTATGGCGACTATAAGGTATACGATGTTCGCAAAATGATTGCGAAATCTGAGCA
GGAGATCGGTAAGGCAACCGCAAAATATTTCTTTTACTCAAACATTATGAATTTCTTTAAGACAGAAATCACTCTGG
CCAACGGGGAGATTCGCAAACGTCCGTTGATCGAAACAAACGGCGAGACTGGCGAAATTGTTTGGGACAAAGGGCGT
GATTTCGCGACGGTGCGCAAGGTACTGAGCATGCCTCAAGTCAATATTGTTAAGAAAACCGAAGTGCAGACGGGCGG
GTTTTCCAAGGAAAGCATCTTACCCAAACGTAATTCAGATAAACTTATTGCACGCAAAAAGGACTGGGATCCGAAAA
AGTATGGAGGCTTCGACAGTCCAACCGTAGCCTACTCTGTTCTCGTTGTAGCGAAAGTAGAAAAGGGTAAATCCAAG
AAACTGAAATCTGTCAAGGAGTTGCTTGGAATCACCATTATGGAGCGTAGCTCCTTCGAGAAGAACCCGATTGACTT
TCTGGAAGCCAAAGGATATAAAGAGGTCAAGAAAGATCTTATCATTAAGCTGCCTAAGTATTCACTCTTCGAGCTGG
AAAATGGTCGTAAACGCATGCTCGCTTCTGCCGGCGAGTTGCAGAAGGGCAATGAATTAGCACTTCCATCAAAGTAC
GTTAACTTCCTGTATTTGGCCAGCCATTACGAGAAACTGAAGGGGTCTCCAGAGGACAACGAACAGAAACAATTATT
TGTAGAGCAGCACAAGCATTATCTTGATGAAATCATTGAGCAAATTTCCGAATTCAGTAAACGCGTAATCCTGGCCG
ATGCAAACCTCGACAAGGTGCTGAGCGCTTACAATAAGCATCGCGACAAACCTATCCGTGAGCAGGCTGAAAATATC
ATTCACCTGTTCACATTAACGAACCTGGGCGCTCCGGCCGCTTTTAAATATTTCGACACGACAATCGACCGTAAGCG
CTATACCAGTACGAAAGAAGTGTTGGATGCGACCCTTATTCACCAGTCAATTACAGGATTATATGAGACCCGTATCG
ACCTTAGCCAATTAGGTGGGGATGCACCTGCGATGGTGAGCAAAGGTGAAGAGGATAATATGGCCATCATCAAAGAA
TTCATGCGCTTCAAAGTTCATATGGAAGGTAGCGTTAATGGCCACGAATTTGAAATTGAAGGTGAAGGCGAAGGTCG
TCCGTATGAAGGCACCCAGACCGCAAAACTGAAAGTTACCAAAGGTGGTCCGCTGCCGTTTGCATGGGATATTCTGA
GTCCGCAGTTTATGTATGGTAGCAAAGCCTATGTTAAACATCCGGCAGATATCCCGGATTATCTGAAACTGAGCTTT
CCGGAAGGTTTTAAATGGGAACGTGTGATGAATTTTGAAGATGGTGGTGTTGTTACCGTTACACAGGATAGCAGCCT
GCAGGATGGTGAATTTATCTATAAAGTTAAACTGCGTGGCACGAATTTTCCGAGTGATGGTCCGGTTATGCAGAAAA
AAACCATGGGTTGGGAAGCAAGCAGCGAACGTATGTATCCGGAAGATGGCGCACTGAAAGGTGAAATTAAACAGCGT
CTGAAGCTGAAAGATGGCGGTCATTATGATGCAGAAGTTAAAACCACCTACAAAGCCAAAAAACCGGTTCAGCTGCC
TGGTGCATATAACGTTAACATTAAACTGGATATCACCAGCCACAACGAGGATTATACCATTGTTGAACAGTATGAAC
GTGCAGAAGGTCGCCATAGTACCGGTGGTATGGATGAACTGTATAAA
(Cas9-APAPA(SEQ ID NO: 11)-mCherry chimera DNA sequence)
SEQ ID NO: 375
ATGGACAAAAAGTACTCTATTGGCCTGGATATCGGGACCAACAGCGTCGGGTGGGCTGTTATCACCGACGAGTATAA
AGTACCTTCGAAAAAGTTCAAAGTGCTGGGCAACACCGATCGCCATTCAATCAAAAAGAACTTGATTGGTGCGCTGT
TGTTTGACTCCGGGGAAACCGCCGAGGCGACTCGCCTTAAACGTACAGCACGTCGCCGGTACACTCGGCGTAAGAAT
CGCATTTGCTATTTGCAGGAAATCTTTAGCAACGAGATGGCAAAAGTCGATGACTCGTTTTTCCACCGCCTCGAGGA
AAGCTTTCTGGTGGAGGAAGACAAAAAGCATGAGCGTCACCCGATCTTCGGCAACATTGTCGATGAAGTAGCGTATC
ATGAAAAATACCCAACCATTTACCACTTACGCAAAAAGCTGGTGGACAGCACTGACAAAGCTGATTTGCGCCTTATC
TATTTAGCCCTGGCACATATGATTAAGTTTCGTGGTCACTTCCTGATCGAAGGAGACTTAAATCCCGACAACAGTGA
TGTTGATAAATTGTTTATTCAGCTTGTCCAAACTTACAATCAACTGTTCGAGGAAAACCCGATCAATGCCTCCGGTG
TGGATGCAAAAGCCATTTTAAGTGCACGCCTTAGCAAGTCCCGTCGCTTAGAAAACCTTATCGCGCAGCTGCCCGGC
GAGAAAAAGAATGGTTTGTTTGGGAACCTTATTGCCTTGAGCTTAGGCCTCACCCCGAATTTCAAAAGTAATTTCGA
TCTTGCAGAAGACGCCAAATTACAACTGTCGAAGGATACTTATGATGACGATCTCGATAATCTGTTAGCGCAGATTG
GTGACCAATACGCCGATCTTTTTCTGGCGGCTAAAAATCTGAGCGACGCCATCTTGCTTTCGGATATTCTCCGCGTT
AACACCGAAATCACGAAAGCGCCTCTTAGTGCCAGCATGATTAAACGTTATGATGAACACCACCAGGACCTGACCTT
ACTCAAAGCGTTGGTTCGCCAGCAACTGCCAGAGAAGTACAAAGAAATCTTCTTTGATCAGTCAAAGAATGGTTATG
CCGGCTATATTGACGGGGGTGCAAGCCAAGAGGAATTCTACAAATTTATCAAGCCTATTCTGGAGAAAATGGATGGC
ACCGAAGAGTTATTGGTGAAGCTTAACCGTGAAGACCTCCTGCGGAAACAGCGCACATTCGATAATGGTTCGATCCC
ACACCAAATCCATTTGGGGGAGTTACACGCTATTTTGCGTCGCCAGGAAGACTTTTACCCTTTCCTGAAGGATAACC
GGGAGAAAATTGAGAAGATCCTTACCTTTCGTATTCCGTATTACGTAGGCCCCTTAGCACGGGGTAATAGCCGTTTC
GCGTGGATGACACGGAAGTCGGAAGAGACGATCACCCCGTGGAACTTCGAAGAGGTAGTCGACAAGGGCGCATCAGC
GCAGTCTTTTATTGAACGTATGACGAATTTCGATAAAAACTTGCCCAATGAGAAGGTGCTTCCGAAACATTCCTTGT
TATATGAATATTTTACAGTTTACAACGAGCTGACCAAGGTTAAATACGTGACGGAAGGAATGCGCAAGCCCGCTTTT
CTTAGCGGTGAGCAAAAAAAGGCGATCGTCGACCTGTTATTCAAAACGAATCGTAAGGTGACTGTAAAGCAACTCAA
AGAAGATTACTTCAAAAAGATTGAGTGCTTCGACAGCGTCGAAATCTCTGGGGTAGAGGATCGGTTTAACGCAAGTT
TAGGTACCTACCATGACCTGCTTAAAATCATTAAGGATAAAGACTTCTTAGATAATGAAGAGAACGAAGATATTCTC
GAGGACATCGTCTTGACGTTAACCTTATTTGAGGATCGTGAAATGATTGAGGAACGCCTCAAAACTTATGCCCACCT
GTTCGACGATAAGGTGATGAAGCAGCTGAAACGTCGGCGCTACACAGGATGGGGCCGCTTGAGTCGCAAACTTATTA
ACGGAATCCGTGACAAGCAATCCGGCAAAACGATTCTGGATTTCTTGAAGTCGGACGGATTTGCTAATCGCAACTTC
ATGCAGTTGATCCATGATGACTCCCTGACTTTTAAAGAGGATATTCAAAAGGCGCAGGTTAGTGGTCAAGGCGACAG
CTTACACGAACACATCGCAAATTTGGCTGGTTCGCCGGCCATTAAAAAGGGGATCCTCCAGACCGTGAAAGTTGTAG
ATGAGCTTGTTAAGGTCATGGGTCGTCATAAGCCCGAAAACATCGTGATTGAAATGGCGCGGGAGAATCAAACGACC
CAGAAAGGACAAAAGAATAGCCGTGAACGGATGAAGCGGATCGAGGAAGGCATTAAAGAGCTGGGGTCTCAAATCTT
GAAGGAACACCCTGTGGAGAACACTCAGCTCCAAAATGAAAAACTTTACCTGTACTATTTGCAGAACGGACGCGATA
TGTACGTGGACCAAGAGTTGGATATTAATCGGCTGAGTGACTACGACGTTGATCATATCGTCCCGCAGAGCTTCCTC
AAAGACGATTCTATTGACAATAAGGTACTGACGCGCTCTGATAAAAACCGTGGTAAGTCGGACAACGTGCCCTCCGA
AGAGGTTGTGAAAAAGATGAAAAATTATTGGCGCCAGCTTTTAAACGCGAAGCTGATCACACAACGTAAATTCGATA
ATTTGACCAAGGCTGAACGGGGTGGCCTGAGCGAGTTAGATAAGGCAGGATTTATTAAACGCCAGTTAGTGGAGACT
CGTCAAATCACCAAACATGTCGCGCAGATTTTGGACAGCCGGATGAACACCAAGTACGATGAAAATGACAAACTGAT
CCGTGAGGTGAAAGTCATTACTCTGAAGTCCAAATTAGTTAGTGATTTCCGGAAGGACTTTCAATTCTACAAAGTCC
GTGAAATTAATAACTATCATCACGCACATGACGCGTACCTGAATGCAGTGGTTGGGACCGCCCTTATCAAGAAATAT
CCTAAGCTGGAGTCGGAGTTTGTCTATGGCGACTATAAGGTATACGATGTTCGCAAAATGATTGCGAAATCTGAGCA
GGAGATCGGTAAGGCAACCGCAAAATATTTCTTTTACTCAAACATTATGAATTTCTTTAAGACAGAAATCACTCTGG
CCAACGGGGAGATTCGCAAACGTCCGTTGATCGAAACAAACGGCGAGACTGGCGAAATTGTTTGGGACAAAGGGCGT
GATTTCGCGACGGTGCGCAAGGTACTGAGCATGCCTCAAGTCAATATTGTTAAGAAAACCGAAGTGCAGACGGGCGG
GTTTTCCAAGGAAAGCATCTTACCCAAACGTAATTCAGATAAACTTATTGCACGCAAAAAGGACTGGGATCCGAAAA
AGTATGGAGGCTTCGACAGTCCAACCGTAGCCTACTCTGTTCTCGTTGTAGCGAAAGTAGAAAAGGGTAAATCCAAG
AAACTGAAATCTGTCAAGGAGTTGCTTGGAATCACCATTATGGAGCGTAGCTCCTTCGAGAAGAACCCGATTGACTT
TCTGGAAGCCAAAGGATATAAAGAGGTCAAGAAAGATCTTATCATTAAGCTGCCTAAGTATTCACTCTTCGAGCTGG
AAAATGGTCGTAAACGCATGCTCGCTTCTGCCGGCGAGTTGCAGAAGGGCAATGAATTAGCACTTCCATCAAAGTAC
GTTAACTTCCTGTATTTGGCCAGCCATTACGAGAAACTGAAGGGGTCTCCAGAGGACAACGAACAGAAACAATTATT
TGTAGAGCAGCACAAGCATTATCTTGATGAAATCATTGAGCAAATTTCCGAATTCAGTAAACGCGTAATCCTGGCCG
ATGCAAACCTCGACAAGGTGCTGAGCGCTTACAATAAGCATCGCGACAAACCTATCCGTGAGCAGGCTGAAAATATC
ATTCACCTGTTCACATTAACGAACCTGGGCGCTCCGGCCGCTTTTAAATATTTCGACACGACAATCGACCGTAAGCG
CTATACCAGTACGAAAGAAGTGTTGGATGCGACCCTTATTCACCAGTCAATTACAGGATTATATGAGACCCGTATCG
ACCTTAGCCAATTAGGTGGGGATGCTCCTGCACCTGCGATGGTGAGCAAAGGTGAAGAGGATAATATGGCCATCATC
AAAGAATTCATGCGCTTCAAAGTTCATATGGAAGGTAGCGTTAATGGCCACGAATTTGAAATTGAAGGTGAAGGCGA
AGGTCGTCCGTATGAAGGCACCCAGACCGCAAAACTGAAAGTTACCAAAGGTGGTCCGCTGCCGTTTGCATGGGATA
TTCTGAGTCCGCAGTTTATGTATGGTAGCAAAGCCTATGTTAAACATCCGGCAGATATCCCGGATTATCTGAAACTG
AGCTTTCCGGAAGGTTTTAAATGGGAACGTGTGATGAATTTTGAAGATGGTGGTGTTGTTACCGTTACACAGGATAG
CAGCCTGCAGGATGGTGAATTTATCTATAAAGTTAAACTGCGTGGCACGAATTTTCCGAGTGATGGTCCGGTTATGC
AGAAAAAAACCATGGGTTGGGAAGCAAGCAGCGAACGTATGTATCCGGAAGATGGCGCACTGAAAGGTGAAATTAAA
CAGCGTCTGAAGCTGAAAGATGGCGGTCATTATGATGCAGAAGTTAAAACCACCTACAAAGCCAAAAAACCGGTTCA
GCTGCCTGGTGCATATAACGTTAACATTAAACTGGATATCACCAGCCACAACGAGGATTATACCATTGTTGAACAGT
ATGAACGTGCAGAAGGTCGCCATAGTACCGGTGGTATGGATGAACTGTATAAA
(Cas9-APAPAPA(SEQ ID NO: 12)-mCherry chimera DNA sequence)
SEQ ID NO: 376
ATGGACAAAAAGTACTCTATTGGCCTGGATATCGGGACCAACAGCGTCGGGTGGGCTGTTATCACCGACGAGTATAA
AGTACCTTCGAAAAAGTTCAAAGTGCTGGGCAACACCGATCGCCATTCAATCAAAAAGAACTTGATTGGTGCGCTGT
TGTTTGACTCCGGGGAAACCGCCGAGGCGACTCGCCTTAAACGTACAGCACGTCGCCGGTACACTCGGCGTAAGAAT
CGCATTTGCTATTTGCAGGAAATCTTTAGCAACGAGATGGCAAAAGTCGATGACTCGTTTTTCCACCGCCTCGAGGA
AAGCTTTCTGGTGGAGGAAGACAAAAAGCATGAGCGTCACCCGATCTTCGGCAACATTGTCGATGAAGTAGCGTATC
ATGAAAAATACCCAACCATTTACCACTTACGCAAAAAGCTGGTGGACAGCACTGACAAAGCTGATTTGCGCCTTATC
TATTTAGCCCTGGCACATATGATTAAGTTTCGTGGTCACTTCCTGATCGAAGGAGACTTAAATCCCGACAACAGTGA
TGTTGATAAATTGTTTATTCAGCTTGTCCAAACTTACAATCAACTGTTCGAGGAAAACCCGATCAATGCCTCCGGTG
TGGATGCAAAAGCCATTTTAAGTGCACGCCTTAGCAAGTCCCGTCGCTTAGAAAACCTTATCGCGCAGCTGCCCGGC
GAGAAAAAGAATGGTTTGTTTGGGAACCTTATTGCCTTGAGCTTAGGCCTCACCCCGAATTTCAAAAGTAATTTCGA
TCTTGCAGAAGACGCCAAATTACAACTGTCGAAGGATACTTATGATGACGATCTCGATAATCTGTTAGCGCAGATTG
GTGACCAATACGCCGATCTTTTTCTGGCGGCTAAAAATCTGAGCGACGCCATCTTGCTTTCGGATATTCTCCGCGTT
AACACCGAAATCACGAAAGCGCCTCTTAGTGCCAGCATGATTAAACGTTATGATGAACACCACCAGGACCTGACCTT
ACTCAAAGCGTTGGTTCGCCAGCAACTGCCAGAGAAGTACAAAGAAATCTTCTTTGATCAGTCAAAGAATGGTTATG
CCGGCTATATTGACGGGGGTGCAAGCCAAGAGGAATTCTACAAATTTATCAAGCCTATTCTGGAGAAAATGGATGGC
ACCGAAGAGTTATTGGTGAAGCTTAACCGTGAAGACCTCCTGCGGAAACAGCGCACATTCGATAATGGTTCGATCCC
ACACCAAATCCATTTGGGGGAGTTACACGCTATTTTGCGTCGCCAGGAAGACTTTTACCCTTTCCTGAAGGATAACC
GGGAGAAAATTGAGAAGATCCTTACCTTTCGTATTCCGTATTACGTAGGCCCCTTAGCACGGGGTAATAGCCGTTTC
GCGTGGATGACACGGAAGTCGGAAGAGACGATCACCCCGTGGAACTTCGAAGAGGTAGTCGACAAGGGCGCATCAGC
GCAGTCTTTTATTGAACGTATGACGAATTTCGATAAAAACTTGCCCAATGAGAAGGTGCTTCCGAAACATTCCTTGT
TATATGAATATTTTACAGTTTACAACGAGCTGACCAAGGTTAAATACGTGACGGAAGGAATGCGCAAGCCCGCTTTT
CTTAGCGGTGAGCAAAAAAAGGCGATCGTCGACCTGTTATTCAAAACGAATCGTAAGGTGACTGTAAAGCAACTCAA
AGAAGATTACTTCAAAAAGATTGAGTGCTTCGACAGCGTCGAAATCTCTGGGGTAGAGGATCGGTTTAACGCAAGTT
TAGGTACCTACCATGACCTGCTTAAAATCATTAAGGATAAAGACTTCTTAGATAATGAAGAGAACGAAGATATTCTC
GAGGACATCGTCTTGACGTTAACCTTATTTGAGGATCGTGAAATGATTGAGGAACGCCTCAAAACTTATGCCCACCT
GTTCGACGATAAGGTGATGAAGCAGCTGAAACGTCGGCGCTACACAGGATGGGGCCGCTTGAGTCGCAAACTTATTA
ACGGAATCCGTGACAAGCAATCCGGCAAAACGATTCTGGATTTCTTGAAGTCGGACGGATTTGCTAATCGCAACTTC
ATGCAGTTGATCCATGATGACTCCCTGACTTTTAAAGAGGATATTCAAAAGGCGCAGGTTAGTGGTCAAGGCGACAG
CTTACACGAACACATCGCAAATTTGGCTGGTTCGCCGGCCATTAAAAAGGGGATCCTCCAGACCGTGAAAGTTGTAG
ATGAGCTTGTTAAGGTCATGGGTCGTCATAAGCCCGAAAACATCGTGATTGAAATGGCGCGGGAGAATCAAACGACC
CAGAAAGGACAAAAGAATAGCCGTGAACGGATGAAGCGGATCGAGGAAGGCATTAAAGAGCTGGGGTCTCAAATCTT
GAAGGAACACCCTGTGGAGAACACTCAGCTCCAAAATGAAAAACTTTACCTGTACTATTTGCAGAACGGACGCGATA
TGTACGTGGACCAAGAGTTGGATATTAATCGGCTGAGTGACTACGACGTTGATCATATCGTCCCGCAGAGCTTCCTC
AAAGACGATTCTATTGACAATAAGGTACTGACGCGCTCTGATAAAAACCGTGGTAAGTCGGACAACGTGCCCTCCGA
AGAGGTTGTGAAAAAGATGAAAAATTATTGGCGCCAGCTTTTAAACGCGAAGCTGATCACACAACGTAAATTCGATA
ATTTGACCAAGGCTGAACGGGGTGGCCTGAGCGAGTTAGATAAGGCAGGATTTATTAAACGCCAGTTAGTGGAGACT
CGTCAAATCACCAAACATGTCGCGCAGATTTTGGACAGCCGGATGAACACCAAGTACGATGAAAATGACAAACTGAT
CCGTGAGGTGAAAGTCATTACTCTGAAGTCCAAATTAGTTAGTGATTTCCGGAAGGACTTTCAATTCTACAAAGTCC
GTGAAATTAATAACTATCATCACGCACATGACGCGTACCTGAATGCAGTGGTTGGGACCGCCCTTATCAAGAAATAT
CCTAAGCTGGAGTCGGAGTTTGTCTATGGCGACTATAAGGTATACGATGTTCGCAAAATGATTGCGAAATCTGAGCA
GGAGATCGGTAAGGCAACCGCAAAATATTTCTTTTACTCAAACATTATGAATTTCTTTAAGACAGAAATCACTCTGG
CCAACGGGGAGATTCGCAAACGTCCGTTGATCGAAACAAACGGCGAGACTGGCGAAATTGTTTGGGACAAAGGGCGT
GATTTCGCGACGGTGCGCAAGGTACTGAGCATGCCTCAAGTCAATATTGTTAAGAAAACCGAAGTGCAGACGGGCGG
GTTTTCCAAGGAAAGCATCTTACCCAAACGTAATTCAGATAAACTTATTGCACGCAAAAAGGACTGGGATCCGAAAA
AGTATGGAGGCTTCGACAGTCCAACCGTAGCCTACTCTGTTCTCGTTGTAGCGAAAGTAGAAAAGGGTAAATCCAAG
AAACTGAAATCTGTCAAGGAGTTGCTTGGAATCACCATTATGGAGCGTAGCTCCTTCGAGAAGAACCCGATTGACTT
TCTGGAAGCCAAAGGATATAAAGAGGTCAAGAAAGATCTTATCATTAAGCTGCCTAAGTATTCACTCTTCGAGCTGG
AAAATGGTCGTAAACGCATGCTCGCTTCTGCCGGCGAGTTGCAGAAGGGCAATGAATTAGCACTTCCATCAAAGTAC
GTTAACTTCCTGTATTTGGCCAGCCATTACGAGAAACTGAAGGGGTCTCCAGAGGACAACGAACAGAAACAATTATT
TGTAGAGCAGCACAAGCATTATCTTGATGAAATCATTGAGCAAATTTCCGAATTCAGTAAACGCGTAATCCTGGCCG
ATGCAAACCTCGACAAGGTGCTGAGCGCTTACAATAAGCATCGCGACAAACCTATCCGTGAGCAGGCTGAAAATATC
ATTCACCTGTTCACATTAACGAACCTGGGCGCTCCGGCCGCTTTTAAATATTTCGACACGACAATCGACCGTAAGCG
CTATACCAGTACGAAAGAAGTGTTGGATGCGACCCTTATTCACCAGTCAATTACAGGATTATATGAGACCCGTATCG
ACCTTAGCCAATTAGGTGGGGATGCGCCAGCTCCTGCACCTGCGATGGTGAGCAAAGGTGAAGAGGATAATATGGCC
ATCATCAAAGAATTCATGCGCTTCAAAGTTCATATGGAAGGTAGCGTTAATGGCCACGAATTTGAAATTGAAGGTGA
AGGCGAAGGTCGTCCGTATGAAGGCACCCAGACCGCAAAACTGAAAGTTACCAAAGGTGGTCCGCTGCCGTTTGCAT
GGGATATTCTGAGTCCGCAGTTTATGTATGGTAGCAAAGCCTATGTTAAACATCCGGCAGATATCCCGGATTATCTG
AAACTGAGCTTTCCGGAAGGTTTTAAATGGGAACGTGTGATGAATTTTGAAGATGGTGGTGTTGTTACCGTTACACA
GGATAGCAGCCTGCAGGATGGTGAATTTATCTATAAAGTTAAACTGCGTGGCACGAATTTTCCGAGTGATGGTCCGG
TTATGCAGAAAAAAACCATGGGTTGGGAAGCAAGCAGCGAACGTATGTATCCGGAAGATGGCGCACTGAAAGGTGAA
ATTAAACAGCGTCTGAAGCTGAAAGATGGCGGTCATTATGATGCAGAAGTTAAAACCACCTACAAAGCCAAAAAACC
GGTTCAGCTGCCTGGTGCATATAACGTTAACATTAAACTGGATATCACCAGCCACAACGAGGATTATACCATTGTTG
AACAGTATGAACGTGCAGAAGGTCGCCATAGTACCGGTGGTATGGATGAACTGTATAAA
(Cas9-APAPAPAPA(SEQ ID NO: 13)-mCherry chimera DNA sequence)
SEQ ID NO: 377
ATGGACAAAAAGTACTCTATTGGCCTGGATATCGGGACCAACAGCGTCGGGTGGGCTGTTATCACCGACGAGTATAA
AGTACCTTCGAAAAAGTTCAAAGTGCTGGGCAACACCGATCGCCATTCAATCAAAAAGAACTTGATTGGTGCGCTGT
TGTTTGACTCCGGGGAAACCGCCGAGGCGACTCGCCTTAAACGTACAGCACGTCGCCGGTACACTCGGCGTAAGAAT
CGCATTTGCTATTTGCAGGAAATCTTTAGCAACGAGATGGCAAAAGTCGATGACTCGTTTTTCCACCGCCTCGAGGA
AAGCTTTCTGGTGGAGGAAGACAAAAAGCATGAGCGTCACCCGATCTTCGGCAACATTGTCGATGAAGTAGCGTATC
ATGAAAAATACCCAACCATTTACCACTTACGCAAAAAGCTGGTGGACAGCACTGACAAAGCTGATTTGCGCCTTATC
TATTTAGCCCTGGCACATATGATTAAGTTTCGTGGTCACTTCCTGATCGAAGGAGACTTAAATCCCGACAACAGTGA
TGTTGATAAATTGTTTATTCAGCTTGTCCAAACTTACAATCAACTGTTCGAGGAAAACCCGATCAATGCCTCCGGTG
TGGATGCAAAAGCCATTTTAAGTGCACGCCTTAGCAAGTCCCGTCGCTTAGAAAACCTTATCGCGCAGCTGCCCGGC
GAGAAAAAGAATGGTTTGTTTGGGAACCTTATTGCCTTGAGCTTAGGCCTCACCCCGAATTTCAAAAGTAATTTCGA
TCTTGCAGAAGACGCCAAATTACAACTGTCGAAGGATACTTATGATGACGATCTCGATAATCTGTTAGCGCAGATTG
GTGACCAATACGCCGATCTTTTTCTGGCGGCTAAAAATCTGAGCGACGCCATCTTGCTTTCGGATATTCTCCGCGTT
AACACCGAAATCACGAAAGCGCCTCTTAGTGCCAGCATGATTAAACGTTATGATGAACACCACCAGGACCTGACCTT
ACTCAAAGCGTTGGTTCGCCAGCAACTGCCAGAGAAGTACAAAGAAATCTTCTTTGATCAGTCAAAGAATGGTTATG
CCGGCTATATTGACGGGGGTGCAAGCCAAGAGGAATTCTACAAATTTATCAAGCCTATTCTGGAGAAAATGGATGGC
ACCGAAGAGTTATTGGTGAAGCTTAACCGTGAAGACCTCCTGCGGAAACAGCGCACATTCGATAATGGTTCGATCCC
ACACCAAATCCATTTGGGGGAGTTACACGCTATTTTGCGTCGCCAGGAAGACTTTTACCCTTTCCTGAAGGATAACC
GGGAGAAAATTGAGAAGATCCTTACCTTTCGTATTCCGTATTACGTAGGCCCCTTAGCACGGGGTAATAGCCGTTTC
GCGTGGATGACACGGAAGTCGGAAGAGACGATCACCCCGTGGAACTTCGAAGAGGTAGTCGACAAGGGCGCATCAGC
GCAGTCTTTTATTGAACGTATGACGAATTTCGATAAAAACTTGCCCAATGAGAAGGTGCTTCCGAAACATTCCTTGT
TATATGAATATTTTACAGTTTACAACGAGCTGACCAAGGTTAAATACGTGACGGAAGGAATGCGCAAGCCCGCTTTT
CTTAGCGGTGAGCAAAAAAAGGCGATCGTCGACCTGTTATTCAAAACGAATCGTAAGGTGACTGTAAAGCAACTCAA
AGAAGATTACTTCAAAAAGATTGAGTGCTTCGACAGCGTCGAAATCTCTGGGGTAGAGGATCGGTTTAACGCAAGTT
TAGGTACCTACCATGACCTGCTTAAAATCATTAAGGATAAAGACTTCTTAGATAATGAAGAGAACGAAGATATTCTC
GAGGACATCGTCTTGACGTTAACCTTATTTGAGGATCGTGAAATGATTGAGGAACGCCTCAAAACTTATGCCCACCT
GTTCGACGATAAGGTGATGAAGCAGCTGAAACGTCGGCGCTACACAGGATGGGGCCGCTTGAGTCGCAAACTTATTA
ACGGAATCCGTGACAAGCAATCCGGCAAAACGATTCTGGATTTCTTGAAGTCGGACGGATTTGCTAATCGCAACTTC
ATGCAGTTGATCCATGATGACTCCCTGACTTTTAAAGAGGATATTCAAAAGGCGCAGGTTAGTGGTCAAGGCGACAG
CTTACACGAACACATCGCAAATTTGGCTGGTTCGCCGGCCATTAAAAAGGGGATCCTCCAGACCGTGAAAGTTGTAG
ATGAGCTTGTTAAGGTCATGGGTCGTCATAAGCCCGAAAACATCGTGATTGAAATGGCGCGGGAGAATCAAACGACC
CAGAAAGGACAAAAGAATAGCCGTGAACGGATGAAGCGGATCGAGGAAGGCATTAAAGAGCTGGGGTCTCAAATCTT
GAAGGAACACCCTGTGGAGAACACTCAGCTCCAAAATGAAAAACTTTACCTGTACTATTTGCAGAACGGACGCGATA
TGTACGTGGACCAAGAGTTGGATATTAATCGGCTGAGTGACTACGACGTTGATCATATCGTCCCGCAGAGCTTCCTC
AAAGACGATTCTATTGACAATAAGGTACTGACGCGCTCTGATAAAAACCGTGGTAAGTCGGACAACGTGCCCTCCGA
AGAGGTTGTGAAAAAGATGAAAAATTATTGGCGCCAGCTTTTAAACGCGAAGCTGATCACACAACGTAAATTCGATA
ATTTGACCAAGGCTGAACGGGGTGGCCTGAGCGAGTTAGATAAGGCAGGATTTATTAAACGCCAGTTAGTGGAGACT
CGTCAAATCACCAAACATGTCGCGCAGATTTTGGACAGCCGGATGAACACCAAGTACGATGAAAATGACAAACTGAT
CCGTGAGGTGAAAGTCATTACTCTGAAGTCCAAATTAGTTAGTGATTTCCGGAAGGACTTTCAATTCTACAAAGTCC
GTGAAATTAATAACTATCATCACGCACATGACGCGTACCTGAATGCAGTGGTTGGGACCGCCCTTATCAAGAAATAT
CCTAAGCTGGAGTCGGAGTTTGTCTATGGCGACTATAAGGTATACGATGTTCGCAAAATGATTGCGAAATCTGAGCA
GGAGATCGGTAAGGCAACCGCAAAATATTTCTTTTACTCAAACATTATGAATTTCTTTAAGACAGAAATCACTCTGG
CCAACGGGGAGATTCGCAAACGTCCGTTGATCGAAACAAACGGCGAGACTGGCGAAATTGTTTGGGACAAAGGGCGT
GATTTCGCGACGGTGCGCAAGGTACTGAGCATGCCTCAAGTCAATATTGTTAAGAAAACCGAAGTGCAGACGGGCGG
GTTTTCCAAGGAAAGCATCTTACCCAAACGTAATTCAGATAAACTTATTGCACGCAAAAAGGACTGGGATCCGAAAA
AGTATGGAGGCTTCGACAGTCCAACCGTAGCCTACTCTGTTCTCGTTGTAGCGAAAGTAGAAAAGGGTAAATCCAAG
AAACTGAAATCTGTCAAGGAGTTGCTTGGAATCACCATTATGGAGCGTAGCTCCTTCGAGAAGAACCCGATTGACTT
TCTGGAAGCCAAAGGATATAAAGAGGTCAAGAAAGATCTTATCATTAAGCTGCCTAAGTATTCACTCTTCGAGCTGG
AAAATGGTCGTAAACGCATGCTCGCTTCTGCCGGCGAGTTGCAGAAGGGCAATGAATTAGCACTTCCATCAAAGTAC
GTTAACTTCCTGTATTTGGCCAGCCATTACGAGAAACTGAAGGGGTCTCCAGAGGACAACGAACAGAAACAATTATT
TGTAGAGCAGCACAAGCATTATCTTGATGAAATCATTGAGCAAATTTCCGAATTCAGTAAACGCGTAATCCTGGCCG
ATGCAAACCTCGACAAGGTGCTGAGCGCTTACAATAAGCATCGCGACAAACCTATCCGTGAGCAGGCTGAAAATATC
ATTCACCTGTTCACATTAACGAACCTGGGCGCTCCGGCCGCTTTTAAATATTTCGACACGACAATCGACCGTAAGCG
CTATACCAGTACGAAAGAAGTGTTGGATGCGACCCTTATTCACCAGTCAATTACAGGATTATATGAGACCCGTATCG
ACCTTAGCCAATTAGGTGGGGATGCTCCTGCGCCAGCTCCTGCACCTGCGATGGTGAGCAAAGGTGAAGAGGATAAT
ATGGCCATCATCAAAGAATTCATGCGCTTCAAAGTTCATATGGAAGGTAGCGTTAATGGCCACGAATTTGAAATTGA
AGGTGAAGGCGAAGGTCGTCCGTATGAAGGCACCCAGACCGCAAAACTGAAAGTTACCAAAGGTGGTCCGCTGCCGT
TTGCATGGGATATTCTGAGTCCGCAGTTTATGTATGGTAGCAAAGCCTATGTTAAACATCCGGCAGATATCCCGGAT
TATCTGAAACTGAGCTTTCCGGAAGGTTTTAAATGGGAACGTGTGATGAATTTTGAAGATGGTGGTGTTGTTACCGT
TACACAGGATAGCAGCCTGCAGGATGGTGAATTTATCTATAAAGTTAAACTGCGTGGCACGAATTTTCCGAGTGATG
GTCCGGTTATGCAGAAAAAAACCATGGGTTGGGAAGCAAGCAGCGAACGTATGTATCCGGAAGATGGCGCACTGAAA
GGTGAAATTAAACAGCGTCTGAAGCTGAAAGATGGCGGTCATTATGATGCAGAAGTTAAAACCACCTACAAAGCCAA
AAAACCGGTTCAGCTGCCTGGTGCATATAACGTTAACATTAAACTGGATATCACCAGCCACAACGAGGATTATACCA
TTGTTGAACAGTATGAACGTGCAGAAGGTCGCCATAGTACCGGTGGTATGGATGAACTGTATAAA
(Cas9-APAPAPAPAPA(SEQ ID NO: 14)-mCherry chimera DNA sequence)
SEQ ID NO: 378
ATGGACAAAAAGTACTCTATTGGCCTGGATATCGGGACCAACAGCGTCGGGTGGGCTGTTATCACCGACGAGTATAA
AGTACCTTCGAAAAAGTTCAAAGTGCTGGGCAACACCGATCGCCATTCAATCAAAAAGAACTTGATTGGTGCGCTGT
TGTTTGACTCCGGGGAAACCGCCGAGGCGACTCGCCTTAAACGTACAGCACGTCGCCGGTACACTCGGCGTAAGAAT
CGCATTTGCTATTTGCAGGAAATCTTTAGCAACGAGATGGCAAAAGTCGATGACTCGTTTTTCCACCGCCTCGAGGA
AAGCTTTCTGGTGGAGGAAGACAAAAAGCATGAGCGTCACCCGATCTTCGGCAACATTGTCGATGAAGTAGCGTATC
ATGAAAAATACCCAACCATTTACCACTTACGCAAAAAGCTGGTGGACAGCACTGACAAAGCTGATTTGCGCCTTATC
TATTTAGCCCTGGCACATATGATTAAGTTTCGTGGTCACTTCCTGATCGAAGGAGACTTAAATCCCGACAACAGTGA
TGTTGATAAATTGTTTATTCAGCTTGTCCAAACTTACAATCAACTGTTCGAGGAAAACCCGATCAATGCCTCCGGTG
TGGATGCAAAAGCCATTTTAAGTGCACGCCTTAGCAAGTCCCGTCGCTTAGAAAACCTTATCGCGCAGCTGCCCGGC
GAGAAAAAGAATGGTTTGTTTGGGAACCTTATTGCCTTGAGCTTAGGCCTCACCCCGAATTTCAAAAGTAATTTCGA
TCTTGCAGAAGACGCCAAATTACAACTGTCGAAGGATACTTATGATGACGATCTCGATAATCTGTTAGCGCAGATTG
GTGACCAATACGCCGATCTTTTTCTGGCGGCTAAAAATCTGAGCGACGCCATCTTGCTTTCGGATATTCTCCGCGTT
AACACCGAAATCACGAAAGCGCCTCTTAGTGCCAGCATGATTAAACGTTATGATGAACACCACCAGGACCTGACCTT
ACTCAAAGCGTTGGTTCGCCAGCAACTGCCAGAGAAGTACAAAGAAATCTTCTTTGATCAGTCAAAGAATGGTTATG
CCGGCTATATTGACGGGGGTGCAAGCCAAGAGGAATTCTACAAATTTATCAAGCCTATTCTGGAGAAAATGGATGGC
ACCGAAGAGTTATTGGTGAAGCTTAACCGTGAAGACCTCCTGCGGAAACAGCGCACATTCGATAATGGTTCGATCCC
ACACCAAATCCATTTGGGGGAGTTACACGCTATTTTGCGTCGCCAGGAAGACTTTTACCCTTTCCTGAAGGATAACC
GGGAGAAAATTGAGAAGATCCTTACCTTTCGTATTCCGTATTACGTAGGCCCCTTAGCACGGGGTAATAGCCGTTTC
GCGTGGATGACACGGAAGTCGGAAGAGACGATCACCCCGTGGAACTTCGAAGAGGTAGTCGACAAGGGCGCATCAGC
GCAGTCTTTTATTGAACGTATGACGAATTTCGATAAAAACTTGCCCAATGAGAAGGTGCTTCCGAAACATTCCTTGT
TATATGAATATTTTACAGTTTACAACGAGCTGACCAAGGTTAAATACGTGACGGAAGGAATGCGCAAGCCCGCTTTT
CTTAGCGGTGAGCAAAAAAAGGCGATCGTCGACCTGTTATTCAAAACGAATCGTAAGGTGACTGTAAAGCAACTCAA
AGAAGATTACTTCAAAAAGATTGAGTGCTTCGACAGCGTCGAAATCTCTGGGGTAGAGGATCGGTTTAACGCAAGTT
TAGGTACCTACCATGACCTGCTTAAAATCATTAAGGATAAAGACTTCTTAGATAATGAAGAGAACGAAGATATTCTC
GAGGACATCGTCTTGACGTTAACCTTATTTGAGGATCGTGAAATGATTGAGGAACGCCTCAAAACTTATGCCCACCT
GTTCGACGATAAGGTGATGAAGCAGCTGAAACGTCGGCGCTACACAGGATGGGGCCGCTTGAGTCGCAAACTTATTA
ACGGAATCCGTGACAAGCAATCCGGCAAAACGATTCTGGATTTCTTGAAGTCGGACGGATTTGCTAATCGCAACTTC
ATGCAGTTGATCCATGATGACTCCCTGACTTTTAAAGAGGATATTCAAAAGGCGCAGGTTAGTGGTCAAGGCGACAG
CTTACACGAACACATCGCAAATTTGGCTGGTTCGCCGGCCATTAAAAAGGGGATCCTCCAGACCGTGAAAGTTGTAG
ATGAGCTTGTTAAGGTCATGGGTCGTCATAAGCCCGAAAACATCGTGATTGAAATGGCGCGGGAGAATCAAACGACC
CAGAAAGGACAAAAGAATAGCCGTGAACGGATGAAGCGGATCGAGGAAGGCATTAAAGAGCTGGGGTCTCAAATCTT
GAAGGAACACCCTGTGGAGAACACTCAGCTCCAAAATGAAAAACTTTACCTGTACTATTTGCAGAACGGACGCGATA
TGTACGTGGACCAAGAGTTGGATATTAATCGGCTGAGTGACTACGACGTTGATCATATCGTCCCGCAGAGCTTCCTC
AAAGACGATTCTATTGACAATAAGGTACTGACGCGCTCTGATAAAAACCGTGGTAAGTCGGACAACGTGCCCTCCGA
AGAGGTTGTGAAAAAGATGAAAAATTATTGGCGCCAGCTTTTAAACGCGAAGCTGATCACACAACGTAAATTCGATA
ATTTGACCAAGGCTGAACGGGGTGGCCTGAGCGAGTTAGATAAGGCAGGATTTATTAAACGCCAGTTAGTGGAGACT
CGTCAAATCACCAAACATGTCGCGCAGATTTTGGACAGCCGGATGAACACCAAGTACGATGAAAATGACAAACTGAT
CCGTGAGGTGAAAGTCATTACTCTGAAGTCCAAATTAGTTAGTGATTTCCGGAAGGACTTTCAATTCTACAAAGTCC
GTGAAATTAATAACTATCATCACGCACATGACGCGTACCTGAATGCAGTGGTTGGGACCGCCCTTATCAAGAAATAT
CCTAAGCTGGAGTCGGAGTTTGTCTATGGCGACTATAAGGTATACGATGTTCGCAAAATGATTGCGAAATCTGAGCA
GGAGATCGGTAAGGCAACCGCAAAATATTTCTTTTACTCAAACATTATGAATTTCTTTAAGACAGAAATCACTCTGG
CCAACGGGGAGATTCGCAAACGTCCGTTGATCGAAACAAACGGCGAGACTGGCGAAATTGTTTGGGACAAAGGGCGT
GATTTCGCGACGGTGCGCAAGGTACTGAGCATGCCTCAAGTCAATATTGTTAAGAAAACCGAAGTGCAGACGGGCGG
GTTTTCCAAGGAAAGCATCTTACCCAAACGTAATTCAGATAAACTTATTGCACGCAAAAAGGACTGGGATCCGAAAA
AGTATGGAGGCTTCGACAGTCCAACCGTAGCCTACTCTGTTCTCGTTGTAGCGAAAGTAGAAAAGGGTAAATCCAAG
AAACTGAAATCTGTCAAGGAGTTGCTTGGAATCACCATTATGGAGCGTAGCTCCTTCGAGAAGAACCCGATTGACTT
TCTGGAAGCCAAAGGATATAAAGAGGTCAAGAAAGATCTTATCATTAAGCTGCCTAAGTATTCACTCTTCGAGCTGG
AAAATGGTCGTAAACGCATGCTCGCTTCTGCCGGCGAGTTGCAGAAGGGCAATGAATTAGCACTTCCATCAAAGTAC
GTTAACTTCCTGTATTTGGCCAGCCATTACGAGAAACTGAAGGGGTCTCCAGAGGACAACGAACAGAAACAATTATT
TGTAGAGCAGCACAAGCATTATCTTGATGAAATCATTGAGCAAATTTCCGAATTCAGTAAACGCGTAATCCTGGCCG
ATGCAAACCTCGACAAGGTGCTGAGCGCTTACAATAAGCATCGCGACAAACCTATCCGTGAGCAGGCTGAAAATATC
ATTCACCTGTTCACATTAACGAACCTGGGCGCTCCGGCCGCTTTTAAATATTTCGACACGACAATCGACCGTAAGCG
CTATACCAGTACGAAAGAAGTGTTGGATGCGACCCTTATTCACCAGTCAATTACAGGATTATATGAGACCCGTATCG
ACCTTAGCCAATTAGGTGGGGATGCGCCCGCTCCTGCGCCAGCTCCTGCACCTGCGATGGTGAGCAAAGGTGAAGAG
GATAATATGGCCATCATCAAAGAATTCATGCGCTTCAAAGTTCATATGGAAGGTAGCGTTAATGGCCACGAATTTGA
AATTGAAGGTGAAGGCGAAGGTCGTCCGTATGAAGGCACCCAGACCGCAAAACTGAAAGTTACCAAAGGTGGTCCGC
TGCCGTTTGCATGGGATATTCTGAGTCCGCAGTTTATGTATGGTAGCAAAGCCTATGTTAAACATCCGGCAGATATC
CCGGATTATCTGAAACTGAGCTTTCCGGAAGGTTTTAAATGGGAACGTGTGATGAATTTTGAAGATGGTGGTGTTGT
TACCGTTACACAGGATAGCAGCCTGCAGGATGGTGAATTTATCTATAAAGTTAAACTGCGTGGCACGAATTTTCCGA
GTGATGGTCCGGTTATGCAGAAAAAAACCATGGGTTGGGAAGCAAGCAGCGAACGTATGTATCCGGAAGATGGCGCA
CTGAAAGGTGAAATTAAACAGCGTCTGAAGCTGAAAGATGGCGGTCATTATGATGCAGAAGTTAAAACCACCTACAA
AGCCAAAAAACCGGTTCAGCTGCCTGGTGCATATAACGTTAACATTAAACTGGATATCACCAGCCACAACGAGGATT
ATACCATTGTTGAACAGTATGAACGTGCAGAAGGTCGCCATAGTACCGGTGGTATGGATGAACTGTATAAA
(Cas9-APAPAPAPAPAPA(SEQ ID NO: 15)-mCherry chimera DNA sequence)
SEQ ID NO: 379
ATGGACAAAAAGTACTCTATTGGCCTGGATATCGGGACCAACAGCGTCGGGTGGGCTGTTATCACCGACGAGTATAA
AGTACCTTCGAAAAAGTTCAAAGTGCTGGGCAACACCGATCGCCATTCAATCAAAAAGAACTTGATTGGTGCGCTGT
TGTTTGACTCCGGGGAAACCGCCGAGGCGACTCGCCTTAAACGTACAGCACGTCGCCGGTACACTCGGCGTAAGAAT
CGCATTTGCTATTTGCAGGAAATCTTTAGCAACGAGATGGCAAAAGTCGATGACTCGTTTTTCCACCGCCTCGAGGA
AAGCTTTCTGGTGGAGGAAGACAAAAAGCATGAGCGTCACCCGATCTTCGGCAACATTGTCGATGAAGTAGCGTATC
ATGAAAAATACCCAACCATTTACCACTTACGCAAAAAGCTGGTGGACAGCACTGACAAAGCTGATTTGCGCCTTATC
TATTTAGCCCTGGCACATATGATTAAGTTTCGTGGTCACTTCCTGATCGAAGGAGACTTAAATCCCGACAACAGTGA
TGTTGATAAATTGTTTATTCAGCTTGTCCAAACTTACAATCAACTGTTCGAGGAAAACCCGATCAATGCCTCCGGTG
TGGATGCAAAAGCCATTTTAAGTGCACGCCTTAGCAAGTCCCGTCGCTTAGAAAACCTTATCGCGCAGCTGCCCGGC
GAGAAAAAGAATGGTTTGTTTGGGAACCTTATTGCCTTGAGCTTAGGCCTCACCCCGAATTTCAAAAGTAATTTCGA
TCTTGCAGAAGACGCCAAATTACAACTGTCGAAGGATACTTATGATGACGATCTCGATAATCTGTTAGCGCAGATTG
GTGACCAATACGCCGATCTTTTTCTGGCGGCTAAAAATCTGAGCGACGCCATCTTGCTTTCGGATATTCTCCGCGTT
AACACCGAAATCACGAAAGCGCCTCTTAGTGCCAGCATGATTAAACGTTATGATGAACACCACCAGGACCTGACCTT
ACTCAAAGCGTTGGTTCGCCAGCAACTGCCAGAGAAGTACAAAGAAATCTTCTTTGATCAGTCAAAGAATGGTTATG
CCGGCTATATTGACGGGGGTGCAAGCCAAGAGGAATTCTACAAATTTATCAAGCCTATTCTGGAGAAAATGGATGGC
ACCGAAGAGTTATTGGTGAAGCTTAACCGTGAAGACCTCCTGCGGAAACAGCGCACATTCGATAATGGTTCGATCCC
ACACCAAATCCATTTGGGGGAGTTACACGCTATTTTGCGTCGCCAGGAAGACTTTTACCCTTTCCTGAAGGATAACC
GGGAGAAAATTGAGAAGATCCTTACCTTTCGTATTCCGTATTACGTAGGCCCCTTAGCACGGGGTAATAGCCGTTTC
GCGTGGATGACACGGAAGTCGGAAGAGACGATCACCCCGTGGAACTTCGAAGAGGTAGTCGACAAGGGCGCATCAGC
GCAGTCTTTTATTGAACGTATGACGAATTTCGATAAAAACTTGCCCAATGAGAAGGTGCTTCCGAAACATTCCTTGT
TATATGAATATTTTACAGTTTACAACGAGCTGACCAAGGTTAAATACGTGACGGAAGGAATGCGCAAGCCCGCTTTT
CTTAGCGGTGAGCAAAAAAAGGCGATCGTCGACCTGTTATTCAAAACGAATCGTAAGGTGACTGTAAAGCAACTCAA
AGAAGATTACTTCAAAAAGATTGAGTGCTTCGACAGCGTCGAAATCTCTGGGGTAGAGGATCGGTTTAACGCAAGTT
TAGGTACCTACCATGACCTGCTTAAAATCATTAAGGATAAAGACTTCTTAGATAATGAAGAGAACGAAGATATTCTC
GAGGACATCGTCTTGACGTTAACCTTATTTGAGGATCGTGAAATGATTGAGGAACGCCTCAAAACTTATGCCCACCT
GTTCGACGATAAGGTGATGAAGCAGCTGAAACGTCGGCGCTACACAGGATGGGGCCGCTTGAGTCGCAAACTTATTA
ACGGAATCCGTGACAAGCAATCCGGCAAAACGATTCTGGATTTCTTGAAGTCGGACGGATTTGCTAATCGCAACTTC
ATGCAGTTGATCCATGATGACTCCCTGACTTTTAAAGAGGATATTCAAAAGGCGCAGGTTAGTGGTCAAGGCGACAG
CTTACACGAACACATCGCAAATTTGGCTGGTTCGCCGGCCATTAAAAAGGGGATCCTCCAGACCGTGAAAGTTGTAG
ATGAGCTTGTTAAGGTCATGGGTCGTCATAAGCCCGAAAACATCGTGATTGAAATGGCGCGGGAGAATCAAACGACC
CAGAAAGGACAAAAGAATAGCCGTGAACGGATGAAGCGGATCGAGGAAGGCATTAAAGAGCTGGGGTCTCAAATCTT
GAAGGAACACCCTGTGGAGAACACTCAGCTCCAAAATGAAAAACTTTACCTGTACTATTTGCAGAACGGACGCGATA
TGTACGTGGACCAAGAGTTGGATATTAATCGGCTGAGTGACTACGACGTTGATCATATCGTCCCGCAGAGCTTCCTC
AAAGACGATTCTATTGACAATAAGGTACTGACGCGCTCTGATAAAAACCGTGGTAAGTCGGACAACGTGCCCTCCGA
AGAGGTTGTGAAAAAGATGAAAAATTATTGGCGCCAGCTTTTAAACGCGAAGCTGATCACACAACGTAAATTCGATA
ATTTGACCAAGGCTGAACGGGGTGGCCTGAGCGAGTTAGATAAGGCAGGATTTATTAAACGCCAGTTAGTGGAGACT
CGTCAAATCACCAAACATGTCGCGCAGATTTTGGACAGCCGGATGAACACCAAGTACGATGAAAATGACAAACTGAT
CCGTGAGGTGAAAGTCATTACTCTGAAGTCCAAATTAGTTAGTGATTTCCGGAAGGACTTTCAATTCTACAAAGTCC
GTGAAATTAATAACTATCATCACGCACATGACGCGTACCTGAATGCAGTGGTTGGGACCGCCCTTATCAAGAAATAT
CCTAAGCTGGAGTCGGAGTTTGTCTATGGCGACTATAAGGTATACGATGTTCGCAAAATGATTGCGAAATCTGAGCA
GGAGATCGGTAAGGCAACCGCAAAATATTTCTTTTACTCAAACATTATGAATTTCTTTAAGACAGAAATCACTCTGG
CCAACGGGGAGATTCGCAAACGTCCGTTGATCGAAACAAACGGCGAGACTGGCGAAATTGTTTGGGACAAAGGGCGT
GATTTCGCGACGGTGCGCAAGGTACTGAGCATGCCTCAAGTCAATATTGTTAAGAAAACCGAAGTGCAGACGGGCGG
GTTTTCCAAGGAAAGCATCTTACCCAAACGTAATTCAGATAAACTTATTGCACGCAAAAAGGACTGGGATCCGAAAA
AGTATGGAGGCTTCGACAGTCCAACCGTAGCCTACTCTGTTCTCGTTGTAGCGAAAGTAGAAAAGGGTAAATCCAAG
AAACTGAAATCTGTCAAGGAGTTGCTTGGAATCACCATTATGGAGCGTAGCTCCTTCGAGAAGAACCCGATTGACTT
TCTGGAAGCCAAAGGATATAAAGAGGTCAAGAAAGATCTTATCATTAAGCTGCCTAAGTATTCACTCTTCGAGCTGG
AAAATGGTCGTAAACGCATGCTCGCTTCTGCCGGCGAGTTGCAGAAGGGCAATGAATTAGCACTTCCATCAAAGTAC
GTTAACTTCCTGTATTTGGCCAGCCATTACGAGAAACTGAAGGGGTCTCCAGAGGACAACGAACAGAAACAATTATT
TGTAGAGCAGCACAAGCATTATCTTGATGAAATCATTGAGCAAATTTCCGAATTCAGTAAACGCGTAATCCTGGCCG
ATGCAAACCTCGACAAGGTGCTGAGCGCTTACAATAAGCATCGCGACAAACCTATCCGTGAGCAGGCTGAAAATATC
ATTCACCTGTTCACATTAACGAACCTGGGCGCTCCGGCCGCTTTTAAATATTTCGACACGACAATCGACCGTAAGCG
CTATACCAGTACGAAAGAAGTGTTGGATGCGACCCTTATTCACCAGTCAATTACAGGATTATATGAGACCCGTATCG
ACCTTAGCCAATTAGGTGGGGATGCGCCAGCGCCTGCTCCTGCACCCGCTCCAGCACCTGCGATGGTGAGCAAAGGT
GAAGAGGATAATATGGCCATCATCAAAGAATTCATGCGCTTCAAAGTTCATATGGAAGGTAGCGTTAATGGCCACGA
ATTTGAAATTGAAGGTGAAGGCGAAGGTCGTCCGTATGAAGGCACCCAGACCGCAAAACTGAAAGTTACCAAAGGTG
GTCCGCTGCCGTTTGCATGGGATATTCTGAGTCCGCAGTTTATGTATGGTAGCAAAGCCTATGTTAAACATCCGGCA
GATATCCCGGATTATCTGAAACTGAGCTTTCCGGAAGGTTTTAAATGGGAACGTGTGATGAATTTTGAAGATGGTGG
TGTTGTTACCGTTACACAGGATAGCAGCCTGCAGGATGGTGAATTTATCTATAAAGTTAAACTGCGTGGCACGAATT
TTCCGAGTGATGGTCCGGTTATGCAGAAAAAAACCATGGGTTGGGAAGCAAGCAGCGAACGTATGTATCCGGAAGAT
GGCGCACTGAAAGGTGAAATTAAACAGCGTCTGAAGCTGAAAGATGGCGGTCATTATGATGCAGAAGTTAAAACCAC
CTACAAAGCCAAAAAACCGGTTCAGCTGCCTGGTGCATATAACGTTAACATTAAACTGGATATCACCAGCCACAACG
AGGATTATACCATTGTTGAACAGTATGAACGTGCAGAAGGTCGCCATAGTACCGGTGGTATGGATGAACTGTATAAA
(Cas9-APAPAPAPAPAPAPA(SEQ ID NO: 16)-mCherry chimera DNA sequence)
SEQ ID NO: 380
ATGGACAAAAAGTACTCTATTGGCCTGGATATCGGGACCAACAGCGTCGGGTGGGCTGTTATCACCGACGAGTATAA
AGTACCTTCGAAAAAGTTCAAAGTGCTGGGCAACACCGATCGCCATTCAATCAAAAAGAACTTGATTGGTGCGCTGT
TGTTTGACTCCGGGGAAACCGCCGAGGCGACTCGCCTTAAACGTACAGCACGTCGCCGGTACACTCGGCGTAAGAAT
CGCATTTGCTATTTGCAGGAAATCTTTAGCAACGAGATGGCAAAAGTCGATGACTCGTTTTTCCACCGCCTCGAGGA
AAGCTTTCTGGTGGAGGAAGACAAAAAGCATGAGCGTCACCCGATCTTCGGCAACATTGTCGATGAAGTAGCGTATC
ATGAAAAATACCCAACCATTTACCACTTACGCAAAAAGCTGGTGGACAGCACTGACAAAGCTGATTTGCGCCTTATC
TATTTAGCCCTGGCACATATGATTAAGTTTCGTGGTCACTTCCTGATCGAAGGAGACTTAAATCCCGACAACAGTGA
TGTTGATAAATTGTTTATTCAGCTTGTCCAAACTTACAATCAACTGTTCGAGGAAAACCCGATCAATGCCTCCGGTG
TGGATGCAAAAGCCATTTTAAGTGCACGCCTTAGCAAGTCCCGTCGCTTAGAAAACCTTATCGCGCAGCTGCCCGGC
GAGAAAAAGAATGGTTTGTTTGGGAACCTTATTGCCTTGAGCTTAGGCCTCACCCCGAATTTCAAAAGTAATTTCGA
TCTTGCAGAAGACGCCAAATTACAACTGTCGAAGGATACTTATGATGACGATCTCGATAATCTGTTAGCGCAGATTG
GTGACCAATACGCCGATCTTTTTCTGGCGGCTAAAAATCTGAGCGACGCCATCTTGCTTTCGGATATTCTCCGCGTT
AACACCGAAATCACGAAAGCGCCTCTTAGTGCCAGCATGATTAAACGTTATGATGAACACCACCAGGACCTGACCTT
ACTCAAAGCGTTGGTTCGCCAGCAACTGCCAGAGAAGTACAAAGAAATCTTCTTTGATCAGTCAAAGAATGGTTATG
CCGGCTATATTGACGGGGGTGCAAGCCAAGAGGAATTCTACAAATTTATCAAGCCTATTCTGGAGAAAATGGATGGC
ACCGAAGAGTTATTGGTGAAGCTTAACCGTGAAGACCTCCTGCGGAAACAGCGCACATTCGATAATGGTTCGATCCC
ACACCAAATCCATTTGGGGGAGTTACACGCTATTTTGCGTCGCCAGGAAGACTTTTACCCTTTCCTGAAGGATAACC
GGGAGAAAATTGAGAAGATCCTTACCTTTCGTATTCCGTATTACGTAGGCCCCTTAGCACGGGGTAATAGCCGTTTC
GCGTGGATGACACGGAAGTCGGAAGAGACGATCACCCCGTGGAACTTCGAAGAGGTAGTCGACAAGGGCGCATCAGC
GCAGTCTTTTATTGAACGTATGACGAATTTCGATAAAAACTTGCCCAATGAGAAGGTGCTTCCGAAACATTCCTTGT
TATATGAATATTTTACAGTTTACAACGAGCTGACCAAGGTTAAATACGTGACGGAAGGAATGCGCAAGCCCGCTTTT
CTTAGCGGTGAGCAAAAAAAGGCGATCGTCGACCTGTTATTCAAAACGAATCGTAAGGTGACTGTAAAGCAACTCAA
AGAAGATTACTTCAAAAAGATTGAGTGCTTCGACAGCGTCGAAATCTCTGGGGTAGAGGATCGGTTTAACGCAAGTT
TAGGTACCTACCATGACCTGCTTAAAATCATTAAGGATAAAGACTTCTTAGATAATGAAGAGAACGAAGATATTCTC
GAGGACATCGTCTTGACGTTAACCTTATTTGAGGATCGTGAAATGATTGAGGAACGCCTCAAAACTTATGCCCACCT
GTTCGACGATAAGGTGATGAAGCAGCTGAAACGTCGGCGCTACACAGGATGGGGCCGCTTGAGTCGCAAACTTATTA
ACGGAATCCGTGACAAGCAATCCGGCAAAACGATTCTGGATTTCTTGAAGTCGGACGGATTTGCTAATCGCAACTTC
ATGCAGTTGATCCATGATGACTCCCTGACTTTTAAAGAGGATATTCAAAAGGCGCAGGTTAGTGGTCAAGGCGACAG
CTTACACGAACACATCGCAAATTTGGCTGGTTCGCCGGCCATTAAAAAGGGGATCCTCCAGACCGTGAAAGTTGTAG
ATGAGCTTGTTAAGGTCATGGGTCGTCATAAGCCCGAAAACATCGTGATTGAAATGGCGCGGGAGAATCAAACGACC
CAGAAAGGACAAAAGAATAGCCGTGAACGGATGAAGCGGATCGAGGAAGGCATTAAAGAGCTGGGGTCTCAAATCTT
GAAGGAACACCCTGTGGAGAACACTCAGCTCCAAAATGAAAAACTTTACCTGTACTATTTGCAGAACGGACGCGATA
TGTACGTGGACCAAGAGTTGGATATTAATCGGCTGAGTGACTACGACGTTGATCATATCGTCCCGCAGAGCTTCCTC
AAAGACGATTCTATTGACAATAAGGTACTGACGCGCTCTGATAAAAACCGTGGTAAGTCGGACAACGTGCCCTCCGA
AGAGGTTGTGAAAAAGATGAAAAATTATTGGCGCCAGCTTTTAAACGCGAAGCTGATCACACAACGTAAATTCGATA
ATTTGACCAAGGCTGAACGGGGTGGCCTGAGCGAGTTAGATAAGGCAGGATTTATTAAACGCCAGTTAGTGGAGACT
CGTCAAATCACCAAACATGTCGCGCAGATTTTGGACAGCCGGATGAACACCAAGTACGATGAAAATGACAAACTGAT
CCGTGAGGTGAAAGTCATTACTCTGAAGTCCAAATTAGTTAGTGATTTCCGGAAGGACTTTCAATTCTACAAAGTCC
GTGAAATTAATAACTATCATCACGCACATGACGCGTACCTGAATGCAGTGGTTGGGACCGCCCTTATCAAGAAATAT
CCTAAGCTGGAGTCGGAGTTTGTCTATGGCGACTATAAGGTATACGATGTTCGCAAAATGATTGCGAAATCTGAGCA
GGAGATCGGTAAGGCAACCGCAAAATATTTCTTTTACTCAAACATTATGAATTTCTTTAAGACAGAAATCACTCTGG
CCAACGGGGAGATTCGCAAACGTCCGTTGATCGAAACAAACGGCGAGACTGGCGAAATTGTTTGGGACAAAGGGCGT
GATTTCGCGACGGTGCGCAAGGTACTGAGCATGCCTCAAGTCAATATTGTTAAGAAAACCGAAGTGCAGACGGGCGG
GTTTTCCAAGGAAAGCATCTTACCCAAACGTAATTCAGATAAACTTATTGCACGCAAAAAGGACTGGGATCCGAAAA
AGTATGGAGGCTTCGACAGTCCAACCGTAGCCTACTCTGTTCTCGTTGTAGCGAAAGTAGAAAAGGGTAAATCCAAG
AAACTGAAATCTGTCAAGGAGTTGCTTGGAATCACCATTATGGAGCGTAGCTCCTTCGAGAAGAACCCGATTGACTT
TCTGGAAGCCAAAGGATATAAAGAGGTCAAGAAAGATCTTATCATTAAGCTGCCTAAGTATTCACTCTTCGAGCTGG
AAAATGGTCGTAAACGCATGCTCGCTTCTGCCGGCGAGTTGCAGAAGGGCAATGAATTAGCACTTCCATCAAAGTAC
GTTAACTTCCTGTATTTGGCCAGCCATTACGAGAAACTGAAGGGGTCTCCAGAGGACAACGAACAGAAACAATTATT
TGTAGAGCAGCACAAGCATTATCTTGATGAAATCATTGAGCAAATTTCCGAATTCAGTAAACGCGTAATCCTGGCCG
ATGCAAACCTCGACAAGGTGCTGAGCGCTTACAATAAGCATCGCGACAAACCTATCCGTGAGCAGGCTGAAAATATC
ATTCACCTGTTCACATTAACGAACCTGGGCGCTCCGGCCGCTTTTAAATATTTCGACACGACAATCGACCGTAAGCG
CTATACCAGTACGAAAGAAGTGTTGGATGCGACCCTTATTCACCAGTCAATTACAGGATTATATGAGACCCGTATCG
ACCTTAGCCAATTAGGTGGGGATGCGCCAGCGCCTGCTCCTGCACCCGCTCCAGCTCCTGCCCCAGCGATGGTGAGC
AAAGGTGAAGAGGATAATATGGCCATCATCAAAGAATTCATGCGCTTCAAAGTTCATATGGAAGGTAGCGTTAATGG
CCACGAATTTGAAATTGAAGGTGAAGGCGAAGGTCGTCCGTATGAAGGCACCCAGACCGCAAAACTGAAAGTTACCA
AAGGTGGTCCGCTGCCGTTTGCATGGGATATTCTGAGTCCGCAGTTTATGTATGGTAGCAAAGCCTATGTTAAACAT
CCGGCAGATATCCCGGATTATCTGAAACTGAGCTTTCCGGAAGGTTTTAAATGGGAACGTGTGATGAATTTTGAAGA
TGGTGGTGTTGTTACCGTTACACAGGATAGCAGCCTGCAGGATGGTGAATTTATCTATAAAGTTAAACTGCGTGGCA
CGAATTTTCCGAGTGATGGTCCGGTTATGCAGAAAAAAACCATGGGTTGGGAAGCAAGCAGCGAACGTATGTATCCG
GAAGATGGCGCACTGAAAGGTGAAATTAAACAGCGTCTGAAGCTGAAAGATGGCGGTCATTATGATGCAGAAGTTAA
AACCACCTACAAAGCCAAAAAACCGGTTCAGCTGCCTGGTGCATATAACGTTAACATTAAACTGGATATCACCAGCC
ACAACGAGGATTATACCATTGTTGAACAGTATGAACGTGCAGAAGGTCGCCATAGTACCGGTGGTATGGATGAACTG
TATAAA
(Cas9-APAPAPAPAPAPAPAPA(SEQ ID NO: 17)-mCherry chimera DNA sequence)
SEQ ID NO: 381
ATGGACAAAAAGTACTCTATTGGCCTGGATATCGGGACCAACAGCGTCGGGTGGGCTGTTATCACCGACGAGTATAA
AGTACCTTCGAAAAAGTTCAAAGTGCTGGGCAACACCGATCGCCATTCAATCAAAAAGAACTTGATTGGTGCGCTGT
TGTTTGACTCCGGGGAAACCGCCGAGGCGACTCGCCTTAAACGTACAGCACGTCGCCGGTACACTCGGCGTAAGAAT
CGCATTTGCTATTTGCAGGAAATCTTTAGCAACGAGATGGCAAAAGTCGATGACTCGTTTTTCCACCGCCTCGAGGA
AAGCTTTCTGGTGGAGGAAGACAAAAAGCATGAGCGTCACCCGATCTTCGGCAACATTGTCGATGAAGTAGCGTATC
ATGAAAAATACCCAACCATTTACCACTTACGCAAAAAGCTGGTGGACAGCACTGACAAAGCTGATTTGCGCCTTATC
TATTTAGCCCTGGCACATATGATTAAGTTTCGTGGTCACTTCCTGATCGAAGGAGACTTAAATCCCGACAACAGTGA
TGTTGATAAATTGTTTATTCAGCTTGTCCAAACTTACAATCAACTGTTCGAGGAAAACCCGATCAATGCCTCCGGTG
TGGATGCAAAAGCCATTTTAAGTGCACGCCTTAGCAAGTCCCGTCGCTTAGAAAACCTTATCGCGCAGCTGCCCGGC
GAGAAAAAGAATGGTTTGTTTGGGAACCTTATTGCCTTGAGCTTAGGCCTCACCCCGAATTTCAAAAGTAATTTCGA
TCTTGCAGAAGACGCCAAATTACAACTGTCGAAGGATACTTATGATGACGATCTCGATAATCTGTTAGCGCAGATTG
GTGACCAATACGCCGATCTTTTTCTGGCGGCTAAAAATCTGAGCGACGCCATCTTGCTTTCGGATATTCTCCGCGTT
AACACCGAAATCACGAAAGCGCCTCTTAGTGCCAGCATGATTAAACGTTATGATGAACACCACCAGGACCTGACCTT
ACTCAAAGCGTTGGTTCGCCAGCAACTGCCAGAGAAGTACAAAGAAATCTTCTTTGATCAGTCAAAGAATGGTTATG
CCGGCTATATTGACGGGGGTGCAAGCCAAGAGGAATTCTACAAATTTATCAAGCCTATTCTGGAGAAAATGGATGGC
ACCGAAGAGTTATTGGTGAAGCTTAACCGTGAAGACCTCCTGCGGAAACAGCGCACATTCGATAATGGTTCGATCCC
ACACCAAATCCATTTGGGGGAGTTACACGCTATTTTGCGTCGCCAGGAAGACTTTTACCCTTTCCTGAAGGATAACC
GGGAGAAAATTGAGAAGATCCTTACCTTTCGTATTCCGTATTACGTAGGCCCCTTAGCACGGGGTAATAGCCGTTTC
GCGTGGATGACACGGAAGTCGGAAGAGACGATCACCCCGTGGAACTTCGAAGAGGTAGTCGACAAGGGCGCATCAGC
GCAGTCTTTTATTGAACGTATGACGAATTTCGATAAAAACTTGCCCAATGAGAAGGTGCTTCCGAAACATTCCTTGT
TATATGAATATTTTACAGTTTACAACGAGCTGACCAAGGTTAAATACGTGACGGAAGGAATGCGCAAGCCCGCTTTT
CTTAGCGGTGAGCAAAAAAAGGCGATCGTCGACCTGTTATTCAAAACGAATCGTAAGGTGACTGTAAAGCAACTCAA
AGAAGATTACTTCAAAAAGATTGAGTGCTTCGACAGCGTCGAAATCTCTGGGGTAGAGGATCGGTTTAACGCAAGTT
TAGGTACCTACCATGACCTGCTTAAAATCATTAAGGATAAAGACTTCTTAGATAATGAAGAGAACGAAGATATTCTC
GAGGACATCGTCTTGACGTTAACCTTATTTGAGGATCGTGAAATGATTGAGGAACGCCTCAAAACTTATGCCCACCT
GTTCGACGATAAGGTGATGAAGCAGCTGAAACGTCGGCGCTACACAGGATGGGGCCGCTTGAGTCGCAAACTTATTA
ACGGAATCCGTGACAAGCAATCCGGCAAAACGATTCTGGATTTCTTGAAGTCGGACGGATTTGCTAATCGCAACTTC
ATGCAGTTGATCCATGATGACTCCCTGACTTTTAAAGAGGATATTCAAAAGGCGCAGGTTAGTGGTCAAGGCGACAG
CTTACACGAACACATCGCAAATTTGGCTGGTTCGCCGGCCATTAAAAAGGGGATCCTCCAGACCGTGAAAGTTGTAG
ATGAGCTTGTTAAGGTCATGGGTCGTCATAAGCCCGAAAACATCGTGATTGAAATGGCGCGGGAGAATCAAACGACC
CAGAAAGGACAAAAGAATAGCCGTGAACGGATGAAGCGGATCGAGGAAGGCATTAAAGAGCTGGGGTCTCAAATCTT
GAAGGAACACCCTGTGGAGAACACTCAGCTCCAAAATGAAAAACTTTACCTGTACTATTTGCAGAACGGACGCGATA
TGTACGTGGACCAAGAGTTGGATATTAATCGGCTGAGTGACTACGACGTTGATCATATCGTCCCGCAGAGCTTCCTC
AAAGACGATTCTATTGACAATAAGGTACTGACGCGCTCTGATAAAAACCGTGGTAAGTCGGACAACGTGCCCTCCGA
AGAGGTTGTGAAAAAGATGAAAAATTATTGGCGCCAGCTTTTAAACGCGAAGCTGATCACACAACGTAAATTCGATA
ATTTGACCAAGGCTGAACGGGGTGGCCTGAGCGAGTTAGATAAGGCAGGATTTATTAAACGCCAGTTAGTGGAGACT
CGTCAAATCACCAAACATGTCGCGCAGATTTTGGACAGCCGGATGAACACCAAGTACGATGAAAATGACAAACTGAT
CCGTGAGGTGAAAGTCATTACTCTGAAGTCCAAATTAGTTAGTGATTTCCGGAAGGACTTTCAATTCTACAAAGTCC
GTGAAATTAATAACTATCATCACGCACATGACGCGTACCTGAATGCAGTGGTTGGGACCGCCCTTATCAAGAAATAT
CCTAAGCTGGAGTCGGAGTTTGTCTATGGCGACTATAAGGTATACGATGTTCGCAAAATGATTGCGAAATCTGAGCA
GGAGATCGGTAAGGCAACCGCAAAATATTTCTTTTACTCAAACATTATGAATTTCTTTAAGACAGAAATCACTCTGG
CCAACGGGGAGATTCGCAAACGTCCGTTGATCGAAACAAACGGCGAGACTGGCGAAATTGTTTGGGACAAAGGGCGT
GATTTCGCGACGGTGCGCAAGGTACTGAGCATGCCTCAAGTCAATATTGTTAAGAAAACCGAAGTGCAGACGGGCGG
GTTTTCCAAGGAAAGCATCTTACCCAAACGTAATTCAGATAAACTTATTGCACGCAAAAAGGACTGGGATCCGAAAA
AGTATGGAGGCTTCGACAGTCCAACCGTAGCCTACTCTGTTCTCGTTGTAGCGAAAGTAGAAAAGGGTAAATCCAAG
AAACTGAAATCTGTCAAGGAGTTGCTTGGAATCACCATTATGGAGCGTAGCTCCTTCGAGAAGAACCCGATTGACTT
TCTGGAAGCCAAAGGATATAAAGAGGTCAAGAAAGATCTTATCATTAAGCTGCCTAAGTATTCACTCTTCGAGCTGG
AAAATGGTCGTAAACGCATGCTCGCTTCTGCCGGCGAGTTGCAGAAGGGCAATGAATTAGCACTTCCATCAAAGTAC
GTTAACTTCCTGTATTTGGCCAGCCATTACGAGAAACTGAAGGGGTCTCCAGAGGACAACGAACAGAAACAATTATT
TGTAGAGCAGCACAAGCATTATCTTGATGAAATCATTGAGCAAATTTCCGAATTCAGTAAACGCGTAATCCTGGCCG
ATGCAAACCTCGACAAGGTGCTGAGCGCTTACAATAAGCATCGCGACAAACCTATCCGTGAGCAGGCTGAAAATATC
ATTCACCTGTTCACATTAACGAACCTGGGCGCTCCGGCCGCTTTTAAATATTTCGACACGACAATCGACCGTAAGCG
CTATACCAGTACGAAAGAAGTGTTGGATGCGACCCTTATTCACCAGTCAATTACAGGATTATATGAGACCCGTATCG
ACCTTAGCCAATTAGGTGGGGATGCGCCAGCGCCTGCTCCTGCACCCGCTCCAGCGCCAGCTCCTGCACCTGCGATG
GTGAGCAAAGGTGAAGAGGATAATATGGCCATCATCAAAGAATTCATGCGCTTCAAAGTTCATATGGAAGGTAGCGT
TAATGGCCACGAATTTGAAATTGAAGGTGAAGGCGAAGGTCGTCCGTATGAAGGCACCCAGACCGCAAAACTGAAAG
TTACCAAAGGTGGTCCGCTGCCGTTTGCATGGGATATTCTGAGTCCGCAGTTTATGTATGGTAGCAAAGCCTATGTT
AAACATCCGGCAGATATCCCGGATTATCTGAAACTGAGCTTTCCGGAAGGTTTTAAATGGGAACGTGTGATGAATTT
TGAAGATGGTGGTGTTGTTACCGTTACACAGGATAGCAGCCTGCAGGATGGTGAATTTATCTATAAAGTTAAACTGC
GTGGCACGAATTTTCCGAGTGATGGTCCGGTTATGCAGAAAAAAACCATGGGTTGGGAAGCAAGCAGCGAACGTATG
TATCCGGAAGATGGCGCACTGAAAGGTGAAATTAAACAGCGTCTGAAGCTGAAAGATGGCGGTCATTATGATGCAGA
AGTTAAAACCACCTACAAAGCCAAAAAACCGGTTCAGCTGCCTGGTGCATATAACGTTAACATTAAACTGGATATCA
CCAGCCACAACGAGGATTATACCATTGTTGAACAGTATGAACGTGCAGAAGGTCGCCATAGTACCGGTGGTATGGAT
GAACTGTATAAA
(Cas9-APAPAPAPAPAPAPAPAPA(SEQ ID NO: 18)-mCherry chimera DNA sequence)
SEQ ID NO: 382
ATGGACAAAAAGTACTCTATTGGCCTGGATATCGGGACCAACAGCGTCGGGTGGGCTGTTATCACCGACGAGTATAA
AGTACCTTCGAAAAAGTTCAAAGTGCTGGGCAACACCGATCGCCATTCAATCAAAAAGAACTTGATTGGTGCGCTGT
TGTTTGACTCCGGGGAAACCGCCGAGGCGACTCGCCTTAAACGTACAGCACGTCGCCGGTACACTCGGCGTAAGAAT
CGCATTTGCTATTTGCAGGAAATCTTTAGCAACGAGATGGCAAAAGTCGATGACTCGTTTTTCCACCGCCTCGAGGA
AAGCTTTCTGGTGGAGGAAGACAAAAAGCATGAGCGTCACCCGATCTTCGGCAACATTGTCGATGAAGTAGCGTATC
ATGAAAAATACCCAACCATTTACCACTTACGCAAAAAGCTGGTGGACAGCACTGACAAAGCTGATTTGCGCCTTATC
TATTTAGCCCTGGCACATATGATTAAGTTTCGTGGTCACTTCCTGATCGAAGGAGACTTAAATCCCGACAACAGTGA
TGTTGATAAATTGTTTATTCAGCTTGTCCAAACTTACAATCAACTGTTCGAGGAAAACCCGATCAATGCCTCCGGTG
TGGATGCAAAAGCCATTTTAAGTGCACGCCTTAGCAAGTCCCGTCGCTTAGAAAACCTTATCGCGCAGCTGCCCGGC
GAGAAAAAGAATGGTTTGTTTGGGAACCTTATTGCCTTGAGCTTAGGCCTCACCCCGAATTTCAAAAGTAATTTCGA
TCTTGCAGAAGACGCCAAATTACAACTGTCGAAGGATACTTATGATGACGATCTCGATAATCTGTTAGCGCAGATTG
GTGACCAATACGCCGATCTTTTTCTGGCGGCTAAAAATCTGAGCGACGCCATCTTGCTTTCGGATATTCTCCGCGTT
AACACCGAAATCACGAAAGCGCCTCTTAGTGCCAGCATGATTAAACGTTATGATGAACACCACCAGGACCTGACCTT
ACTCAAAGCGTTGGTTCGCCAGCAACTGCCAGAGAAGTACAAAGAAATCTTCTTTGATCAGTCAAAGAATGGTTATG
CCGGCTATATTGACGGGGGTGCAAGCCAAGAGGAATTCTACAAATTTATCAAGCCTATTCTGGAGAAAATGGATGGC
ACCGAAGAGTTATTGGTGAAGCTTAACCGTGAAGACCTCCTGCGGAAACAGCGCACATTCGATAATGGTTCGATCCC
ACACCAAATCCATTTGGGGGAGTTACACGCTATTTTGCGTCGCCAGGAAGACTTTTACCCTTTCCTGAAGGATAACC
GGGAGAAAATTGAGAAGATCCTTACCTTTCGTATTCCGTATTACGTAGGCCCCTTAGCACGGGGTAATAGCCGTTTC
GCGTGGATGACACGGAAGTCGGAAGAGACGATCACCCCGTGGAACTTCGAAGAGGTAGTCGACAAGGGCGCATCAGC
GCAGTCTTTTATTGAACGTATGACGAATTTCGATAAAAACTTGCCCAATGAGAAGGTGCTTCCGAAACATTCCTTGT
TATATGAATATTTTACAGTTTACAACGAGCTGACCAAGGTTAAATACGTGACGGAAGGAATGCGCAAGCCCGCTTTT
CTTAGCGGTGAGCAAAAAAAGGCGATCGTCGACCTGTTATTCAAAACGAATCGTAAGGTGACTGTAAAGCAACTCAA
AGAAGATTACTTCAAAAAGATTGAGTGCTTCGACAGCGTCGAAATCTCTGGGGTAGAGGATCGGTTTAACGCAAGTT
TAGGTACCTACCATGACCTGCTTAAAATCATTAAGGATAAAGACTTCTTAGATAATGAAGAGAACGAAGATATTCTC
GAGGACATCGTCTTGACGTTAACCTTATTTGAGGATCGTGAAATGATTGAGGAACGCCTCAAAACTTATGCCCACCT
GTTCGACGATAAGGTGATGAAGCAGCTGAAACGTCGGCGCTACACAGGATGGGGCCGCTTGAGTCGCAAACTTATTA
ACGGAATCCGTGACAAGCAATCCGGCAAAACGATTCTGGATTTCTTGAAGTCGGACGGATTTGCTAATCGCAACTTC
ATGCAGTTGATCCATGATGACTCCCTGACTTTTAAAGAGGATATTCAAAAGGCGCAGGTTAGTGGTCAAGGCGACAG
CTTACACGAACACATCGCAAATTTGGCTGGTTCGCCGGCCATTAAAAAGGGGATCCTCCAGACCGTGAAAGTTGTAG
ATGAGCTTGTTAAGGTCATGGGTCGTCATAAGCCCGAAAACATCGTGATTGAAATGGCGCGGGAGAATCAAACGACC
CAGAAAGGACAAAAGAATAGCCGTGAACGGATGAAGCGGATCGAGGAAGGCATTAAAGAGCTGGGGTCTCAAATCTT
GAAGGAACACCCTGTGGAGAACACTCAGCTCCAAAATGAAAAACTTTACCTGTACTATTTGCAGAACGGACGCGATA
TGTACGTGGACCAAGAGTTGGATATTAATCGGCTGAGTGACTACGACGTTGATCATATCGTCCCGCAGAGCTTCCTC
AAAGACGATTCTATTGACAATAAGGTACTGACGCGCTCTGATAAAAACCGTGGTAAGTCGGACAACGTGCCCTCCGA
AGAGGTTGTGAAAAAGATGAAAAATTATTGGCGCCAGCTTTTAAACGCGAAGCTGATCACACAACGTAAATTCGATA
ATTTGACCAAGGCTGAACGGGGTGGCCTGAGCGAGTTAGATAAGGCAGGATTTATTAAACGCCAGTTAGTGGAGACT
CGTCAAATCACCAAACATGTCGCGCAGATTTTGGACAGCCGGATGAACACCAAGTACGATGAAAATGACAAACTGAT
CCGTGAGGTGAAAGTCATTACTCTGAAGTCCAAATTAGTTAGTGATTTCCGGAAGGACTTTCAATTCTACAAAGTCC
GTGAAATTAATAACTATCATCACGCACATGACGCGTACCTGAATGCAGTGGTTGGGACCGCCCTTATCAAGAAATAT
CCTAAGCTGGAGTCGGAGTTTGTCTATGGCGACTATAAGGTATACGATGTTCGCAAAATGATTGCGAAATCTGAGCA
GGAGATCGGTAAGGCAACCGCAAAATATTTCTTTTACTCAAACATTATGAATTTCTTTAAGACAGAAATCACTCTGG
CCAACGGGGAGATTCGCAAACGTCCGTTGATCGAAACAAACGGCGAGACTGGCGAAATTGTTTGGGACAAAGGGCGT
GATTTCGCGACGGTGCGCAAGGTACTGAGCATGCCTCAAGTCAATATTGTTAAGAAAACCGAAGTGCAGACGGGCGG
GTTTTCCAAGGAAAGCATCTTACCCAAACGTAATTCAGATAAACTTATTGCACGCAAAAAGGACTGGGATCCGAAAA
AGTATGGAGGCTTCGACAGTCCAACCGTAGCCTACTCTGTTCTCGTTGTAGCGAAAGTAGAAAAGGGTAAATCCAAG
AAACTGAAATCTGTCAAGGAGTTGCTTGGAATCACCATTATGGAGCGTAGCTCCTTCGAGAAGAACCCGATTGACTT
TCTGGAAGCCAAAGGATATAAAGAGGTCAAGAAAGATCTTATCATTAAGCTGCCTAAGTATTCACTCTTCGAGCTGG
AAAATGGTCGTAAACGCATGCTCGCTTCTGCCGGCGAGTTGCAGAAGGGCAATGAATTAGCACTTCCATCAAAGTAC
GTTAACTTCCTGTATTTGGCCAGCCATTACGAGAAACTGAAGGGGTCTCCAGAGGACAACGAACAGAAACAATTATT
TGTAGAGCAGCACAAGCATTATCTTGATGAAATCATTGAGCAAATTTCCGAATTCAGTAAACGCGTAATCCTGGCCG
ATGCAAACCTCGACAAGGTGCTGAGCGCTTACAATAAGCATCGCGACAAACCTATCCGTGAGCAGGCTGAAAATATC
ATTCACCTGTTCACATTAACGAACCTGGGCGCTCCGGCCGCTTTTAAATATTTCGACACGACAATCGACCGTAAGCG
CTATACCAGTACGAAAGAAGTGTTGGATGCGACCCTTATTCACCAGTCAATTACAGGATTATATGAGACCCGTATCG
ACCTTAGCCAATTAGGTGGGGATGCGCCAGCGCCTGCTCCTGCACCCGCTCCAGCTCCTGCGCCAGCTCCTGCACCT
GCGATGGTGAGCAAAGGTGAAGAGGATAATATGGCCATCATCAAAGAATTCATGCGCTTCAAAGTTCATATGGAAGG
TAGCGTTAATGGCCACGAATTTGAAATTGAAGGTGAAGGCGAAGGTCGTCCGTATGAAGGCACCCAGACCGCAAAAC
TGAAAGTTACCAAAGGTGGTCCGCTGCCGTTTGCATGGGATATTCTGAGTCCGCAGTTTATGTATGGTAGCAAAGCC
TATGTTAAACATCCGGCAGATATCCCGGATTATCTGAAACTGAGCTTTCCGGAAGGTTTTAAATGGGAACGTGTGAT
GAATTTTGAAGATGGTGGTGTTGTTACCGTTACACAGGATAGCAGCCTGCAGGATGGTGAATTTATCTATAAAGTTA
AACTGCGTGGCACGAATTTTCCGAGTGATGGTCCGGTTATGCAGAAAAAAACCATGGGTTGGGAAGCAAGCAGCGAA
CGTATGTATCCGGAAGATGGCGCACTGAAAGGTGAAATTAAACAGCGTCTGAAGCTGAAAGATGGCGGTCATTATGA
TGCAGAAGTTAAAACCACCTACAAAGCCAAAAAACCGGTTCAGCTGCCTGGTGCATATAACGTTAACATTAAACTGG
ATATCACCAGCCACAACGAGGATTATACCATTGTTGAACAGTATGAACGTGCAGAAGGTCGCCATAGTACCGGTGGT
ATGGATGAACTGTATAAA
(Cas9-APAPAPAPAPAPAPAPAPAPA(SEQ ID NO: 19)-mCherry chimera DNA sequence)
SEQ ID NO: 383
ATGGACAAAAAGTACTCTATTGGCCTGGATATCGGGACCAACAGCGTCGGGTGGGCTGTTATCACCGACGAGTATAA
AGTACCTTCGAAAAAGTTCAAAGTGCTGGGCAACACCGATCGCCATTCAATCAAAAAGAACTTGATTGGTGCGCTGT
TGTTTGACTCCGGGGAAACCGCCGAGGCGACTCGCCTTAAACGTACAGCACGTCGCCGGTACACTCGGCGTAAGAAT
CGCATTTGCTATTTGCAGGAAATCTTTAGCAACGAGATGGCAAAAGTCGATGACTCGTTTTTCCACCGCCTCGAGGA
AAGCTTTCTGGTGGAGGAAGACAAAAAGCATGAGCGTCACCCGATCTTCGGCAACATTGTCGATGAAGTAGCGTATC
ATGAAAAATACCCAACCATTTACCACTTACGCAAAAAGCTGGTGGACAGCACTGACAAAGCTGATTTGCGCCTTATC
TATTTAGCCCTGGCACATATGATTAAGTTTCGTGGTCACTTCCTGATCGAAGGAGACTTAAATCCCGACAACAGTGA
TGTTGATAAATTGTTTATTCAGCTTGTCCAAACTTACAATCAACTGTTCGAGGAAAACCCGATCAATGCCTCCGGTG
TGGATGCAAAAGCCATTTTAAGTGCACGCCTTAGCAAGTCCCGTCGCTTAGAAAACCTTATCGCGCAGCTGCCCGGC
GAGAAAAAGAATGGTTTGTTTGGGAACCTTATTGCCTTGAGCTTAGGCCTCACCCCGAATTTCAAAAGTAATTTCGA
TCTTGCAGAAGACGCCAAATTACAACTGTCGAAGGATACTTATGATGACGATCTCGATAATCTGTTAGCGCAGATTG
GTGACCAATACGCCGATCTTTTTCTGGCGGCTAAAAATCTGAGCGACGCCATCTTGCTTTCGGATATTCTCCGCGTT
AACACCGAAATCACGAAAGCGCCTCTTAGTGCCAGCATGATTAAACGTTATGATGAACACCACCAGGACCTGACCTT
ACTCAAAGCGTTGGTTCGCCAGCAACTGCCAGAGAAGTACAAAGAAATCTTCTTTGATCAGTCAAAGAATGGTTATG
CCGGCTATATTGACGGGGGTGCAAGCCAAGAGGAATTCTACAAATTTATCAAGCCTATTCTGGAGAAAATGGATGGC
ACCGAAGAGTTATTGGTGAAGCTTAACCGTGAAGACCTCCTGCGGAAACAGCGCACATTCGATAATGGTTCGATCCC
ACACCAAATCCATTTGGGGGAGTTACACGCTATTTTGCGTCGCCAGGAAGACTTTTACCCTTTCCTGAAGGATAACC
GGGAGAAAATTGAGAAGATCCTTACCTTTCGTATTCCGTATTACGTAGGCCCCTTAGCACGGGGTAATAGCCGTTTC
GCGTGGATGACACGGAAGTCGGAAGAGACGATCACCCCGTGGAACTTCGAAGAGGTAGTCGACAAGGGCGCATCAGC
GCAGTCTTTTATTGAACGTATGACGAATTTCGATAAAAACTTGCCCAATGAGAAGGTGCTTCCGAAACATTCCTTGT
TATATGAATATTTTACAGTTTACAACGAGCTGACCAAGGTTAAATACGTGACGGAAGGAATGCGCAAGCCCGCTTTT
CTTAGCGGTGAGCAAAAAAAGGCGATCGTCGACCTGTTATTCAAAACGAATCGTAAGGTGACTGTAAAGCAACTCAA
AGAAGATTACTTCAAAAAGATTGAGTGCTTCGACAGCGTCGAAATCTCTGGGGTAGAGGATCGGTTTAACGCAAGTT
TAGGTACCTACCATGACCTGCTTAAAATCATTAAGGATAAAGACTTCTTAGATAATGAAGAGAACGAAGATATTCTC
GAGGACATCGTCTTGACGTTAACCTTATTTGAGGATCGTGAAATGATTGAGGAACGCCTCAAAACTTATGCCCACCT
GTTCGACGATAAGGTGATGAAGCAGCTGAAACGTCGGCGCTACACAGGATGGGGCCGCTTGAGTCGCAAACTTATTA
ACGGAATCCGTGACAAGCAATCCGGCAAAACGATTCTGGATTTCTTGAAGTCGGACGGATTTGCTAATCGCAACTTC
ATGCAGTTGATCCATGATGACTCCCTGACTTTTAAAGAGGATATTCAAAAGGCGCAGGTTAGTGGTCAAGGCGACAG
CTTACACGAACACATCGCAAATTTGGCTGGTTCGCCGGCCATTAAAAAGGGGATCCTCCAGACCGTGAAAGTTGTAG
ATGAGCTTGTTAAGGTCATGGGTCGTCATAAGCCCGAAAACATCGTGATTGAAATGGCGCGGGAGAATCAAACGACC
CAGAAAGGACAAAAGAATAGCCGTGAACGGATGAAGCGGATCGAGGAAGGCATTAAAGAGCTGGGGTCTCAAATCTT
GAAGGAACACCCTGTGGAGAACACTCAGCTCCAAAATGAAAAACTTTACCTGTACTATTTGCAGAACGGACGCGATA
TGTACGTGGACCAAGAGTTGGATATTAATCGGCTGAGTGACTACGACGTTGATCATATCGTCCCGCAGAGCTTCCTC
AAAGACGATTCTATTGACAATAAGGTACTGACGCGCTCTGATAAAAACCGTGGTAAGTCGGACAACGTGCCCTCCGA
AGAGGTTGTGAAAAAGATGAAAAATTATTGGCGCCAGCTTTTAAACGCGAAGCTGATCACACAACGTAAATTCGATA
ATTTGACCAAGGCTGAACGGGGTGGCCTGAGCGAGTTAGATAAGGCAGGATTTATTAAACGCCAGTTAGTGGAGACT
CGTCAAATCACCAAACATGTCGCGCAGATTTTGGACAGCCGGATGAACACCAAGTACGATGAAAATGACAAACTGAT
CCGTGAGGTGAAAGTCATTACTCTGAAGTCCAAATTAGTTAGTGATTTCCGGAAGGACTTTCAATTCTACAAAGTCC
GTGAAATTAATAACTATCATCACGCACATGACGCGTACCTGAATGCAGTGGTTGGGACCGCCCTTATCAAGAAATAT
CCTAAGCTGGAGTCGGAGTTTGTCTATGGCGACTATAAGGTATACGATGTTCGCAAAATGATTGCGAAATCTGAGCA
GGAGATCGGTAAGGCAACCGCAAAATATTTCTTTTACTCAAACATTATGAATTTCTTTAAGACAGAAATCACTCTGG
CCAACGGGGAGATTCGCAAACGTCCGTTGATCGAAACAAACGGCGAGACTGGCGAAATTGTTTGGGACAAAGGGCGT
GATTTCGCGACGGTGCGCAAGGTACTGAGCATGCCTCAAGTCAATATTGTTAAGAAAACCGAAGTGCAGACGGGCGG
GTTTTCCAAGGAAAGCATCTTACCCAAACGTAATTCAGATAAACTTATTGCACGCAAAAAGGACTGGGATCCGAAAA
AGTATGGAGGCTTCGACAGTCCAACCGTAGCCTACTCTGTTCTCGTTGTAGCGAAAGTAGAAAAGGGTAAATCCAAG
AAACTGAAATCTGTCAAGGAGTTGCTTGGAATCACCATTATGGAGCGTAGCTCCTTCGAGAAGAACCCGATTGACTT
TCTGGAAGCCAAAGGATATAAAGAGGTCAAGAAAGATCTTATCATTAAGCTGCCTAAGTATTCACTCTTCGAGCTGG
AAAATGGTCGTAAACGCATGCTCGCTTCTGCCGGCGAGTTGCAGAAGGGCAATGAATTAGCACTTCCATCAAAGTAC
GTTAACTTCCTGTATTTGGCCAGCCATTACGAGAAACTGAAGGGGTCTCCAGAGGACAACGAACAGAAACAATTATT
TGTAGAGCAGCACAAGCATTATCTTGATGAAATCATTGAGCAAATTTCCGAATTCAGTAAACGCGTAATCCTGGCCG
ATGCAAACCTCGACAAGGTGCTGAGCGCTTACAATAAGCATCGCGACAAACCTATCCGTGAGCAGGCTGAAAATATC
ATTCACCTGTTCACATTAACGAACCTGGGCGCTCCGGCCGCTTTTAAATATTTCGACACGACAATCGACCGTAAGCG
CTATACCAGTACGAAAGAAGTGTTGGATGCGACCCTTATTCACCAGTCAATTACAGGATTATATGAGACCCGTATCG
ACCTTAGCCAATTAGGTGGGGATGCGCCAGCGCCTGCTCCTGCACCCGCTCCAGCTCCTGCTCCTGCGCCAGCTCCT
GCACCTGCGATGGTGAGCAAAGGTGAAGAGGATAATATGGCCATCATCAAAGAATTCATGCGCTTCAAAGTTCATAT
GGAAGGTAGCGTTAATGGCCACGAATTTGAAATTGAAGGTGAAGGCGAAGGTCGTCCGTATGAAGGCACCCAGACCG
CAAAACTGAAAGTTACCAAAGGTGGTCCGCTGCCGTTTGCATGGGATATTCTGAGTCCGCAGTTTATGTATGGTAGC
AAAGCCTATGTTAAACATCCGGCAGATATCCCGGATTATCTGAAACTGAGCTTTCCGGAAGGTTTTAAATGGGAACG
TGTGATGAATTTTGAAGATGGTGGTGTTGTTACCGTTACACAGGATAGCAGCCTGCAGGATGGTGAATTTATCTATA
AAGTTAAACTGCGTGGCACGAATTTTCCGAGTGATGGTCCGGTTATGCAGAAAAAAACCATGGGTTGGGAAGCAAGC
AGCGAACGTATGTATCCGGAAGATGGCGCACTGAAAGGTGAAATTAAACAGCGTCTGAAGCTGAAAGATGGCGGTCA
TTATGATGCAGAAGTTAAAACCACCTACAAAGCCAAAAAACCGGTTCAGCTGCCTGGTGCATATAACGTTAACATTA
AACTGGATATCACCAGCCACAACGAGGATTATACCATTGTTGAACAGTATGAACGTGCAGAAGGTCGCCATAGTACC
GGTGGTATGGATGAACTGTATAAA
(Cas9-APAPAPAPAPAPAPAPAPAPAPA(SEQ ID NO: 20)-mCherry chimera DNA sequence)
SEQ ID NO: 384
ATGGACAAAAAGTACTCTATTGGCCTGGATATCGGGACCAACAGCGTCGGGTGGGCTGTTATCACCGACGAGTATAA
AGTACCTTCGAAAAAGTTCAAAGTGCTGGGCAACACCGATCGCCATTCAATCAAAAAGAACTTGATTGGTGCGCTGT
TGTTTGACTCCGGGGAAACCGCCGAGGCGACTCGCCTTAAACGTACAGCACGTCGCCGGTACACTCGGCGTAAGAAT
CGCATTTGCTATTTGCAGGAAATCTTTAGCAACGAGATGGCAAAAGTCGATGACTCGTTTTTCCACCGCCTCGAGGA
AAGCTTTCTGGTGGAGGAAGACAAAAAGCATGAGCGTCACCCGATCTTCGGCAACATTGTCGATGAAGTAGCGTATC
ATGAAAAATACCCAACCATTTACCACTTACGCAAAAAGCTGGTGGACAGCACTGACAAAGCTGATTTGCGCCTTATC
TATTTAGCCCTGGCACATATGATTAAGTTTCGTGGTCACTTCCTGATCGAAGGAGACTTAAATCCCGACAACAGTGA
TGTTGATAAATTGTTTATTCAGCTTGTCCAAACTTACAATCAACTGTTCGAGGAAAACCCGATCAATGCCTCCGGTG
TGGATGCAAAAGCCATTTTAAGTGCACGCCTTAGCAAGTCCCGTCGCTTAGAAAACCTTATCGCGCAGCTGCCCGGC
GAGAAAAAGAATGGTTTGTTTGGGAACCTTATTGCCTTGAGCTTAGGCCTCACCCCGAATTTCAAAAGTAATTTCGA
TCTTGCAGAAGACGCCAAATTACAACTGTCGAAGGATACTTATGATGACGATCTCGATAATCTGTTAGCGCAGATTG
GTGACCAATACGCCGATCTTTTTCTGGCGGCTAAAAATCTGAGCGACGCCATCTTGCTTTCGGATATTCTCCGCGTT
AACACCGAAATCACGAAAGCGCCTCTTAGTGCCAGCATGATTAAACGTTATGATGAACACCACCAGGACCTGACCTT
ACTCAAAGCGTTGGTTCGCCAGCAACTGCCAGAGAAGTACAAAGAAATCTTCTTTGATCAGTCAAAGAATGGTTATG
CCGGCTATATTGACGGGGGTGCAAGCCAAGAGGAATTCTACAAATTTATCAAGCCTATTCTGGAGAAAATGGATGGC
ACCGAAGAGTTATTGGTGAAGCTTAACCGTGAAGACCTCCTGCGGAAACAGCGCACATTCGATAATGGTTCGATCCC
ACACCAAATCCATTTGGGGGAGTTACACGCTATTTTGCGTCGCCAGGAAGACTTTTACCCTTTCCTGAAGGATAACC
GGGAGAAAATTGAGAAGATCCTTACCTTTCGTATTCCGTATTACGTAGGCCCCTTAGCACGGGGTAATAGCCGTTTC
GCGTGGATGACACGGAAGTCGGAAGAGACGATCACCCCGTGGAACTTCGAAGAGGTAGTCGACAAGGGCGCATCAGC
GCAGTCTTTTATTGAACGTATGACGAATTTCGATAAAAACTTGCCCAATGAGAAGGTGCTTCCGAAACATTCCTTGT
TATATGAATATTTTACAGTTTACAACGAGCTGACCAAGGTTAAATACGTGACGGAAGGAATGCGCAAGCCCGCTTTT
CTTAGCGGTGAGCAAAAAAAGGCGATCGTCGACCTGTTATTCAAAACGAATCGTAAGGTGACTGTAAAGCAACTCAA
AGAAGATTACTTCAAAAAGATTGAGTGCTTCGACAGCGTCGAAATCTCTGGGGTAGAGGATCGGTTTAACGCAAGTT
TAGGTACCTACCATGACCTGCTTAAAATCATTAAGGATAAAGACTTCTTAGATAATGAAGAGAACGAAGATATTCTC
GAGGACATCGTCTTGACGTTAACCTTATTTGAGGATCGTGAAATGATTGAGGAACGCCTCAAAACTTATGCCCACCT
GTTCGACGATAAGGTGATGAAGCAGCTGAAACGTCGGCGCTACACAGGATGGGGCCGCTTGAGTCGCAAACTTATTA
ACGGAATCCGTGACAAGCAATCCGGCAAAACGATTCTGGATTTCTTGAAGTCGGACGGATTTGCTAATCGCAACTTC
ATGCAGTTGATCCATGATGACTCCCTGACTTTTAAAGAGGATATTCAAAAGGCGCAGGTTAGTGGTCAAGGCGACAG
CTTACACGAACACATCGCAAATTTGGCTGGTTCGCCGGCCATTAAAAAGGGGATCCTCCAGACCGTGAAAGTTGTAG
ATGAGCTTGTTAAGGTCATGGGTCGTCATAAGCCCGAAAACATCGTGATTGAAATGGCGCGGGAGAATCAAACGACC
CAGAAAGGACAAAAGAATAGCCGTGAACGGATGAAGCGGATCGAGGAAGGCATTAAAGAGCTGGGGTCTCAAATCTT
GAAGGAACACCCTGTGGAGAACACTCAGCTCCAAAATGAAAAACTTTACCTGTACTATTTGCAGAACGGACGCGATA
TGTACGTGGACCAAGAGTTGGATATTAATCGGCTGAGTGACTACGACGTTGATCATATCGTCCCGCAGAGCTTCCTC
AAAGACGATTCTATTGACAATAAGGTACTGACGCGCTCTGATAAAAACCGTGGTAAGTCGGACAACGTGCCCTCCGA
AGAGGTTGTGAAAAAGATGAAAAATTATTGGCGCCAGCTTTTAAACGCGAAGCTGATCACACAACGTAAATTCGATA
ATTTGACCAAGGCTGAACGGGGTGGCCTGAGCGAGTTAGATAAGGCAGGATTTATTAAACGCCAGTTAGTGGAGACT
CGTCAAATCACCAAACATGTCGCGCAGATTTTGGACAGCCGGATGAACACCAAGTACGATGAAAATGACAAACTGAT
CCGTGAGGTGAAAGTCATTACTCTGAAGTCCAAATTAGTTAGTGATTTCCGGAAGGACTTTCAATTCTACAAAGTCC
GTGAAATTAATAACTATCATCACGCACATGACGCGTACCTGAATGCAGTGGTTGGGACCGCCCTTATCAAGAAATAT
CCTAAGCTGGAGTCGGAGTTTGTCTATGGCGACTATAAGGTATACGATGTTCGCAAAATGATTGCGAAATCTGAGCA
GGAGATCGGTAAGGCAACCGCAAAATATTTCTTTTACTCAAACATTATGAATTTCTTTAAGACAGAAATCACTCTGG
CCAACGGGGAGATTCGCAAACGTCCGTTGATCGAAACAAACGGCGAGACTGGCGAAATTGTTTGGGACAAAGGGCGT
GATTTCGCGACGGTGCGCAAGGTACTGAGCATGCCTCAAGTCAATATTGTTAAGAAAACCGAAGTGCAGACGGGCGG
GTTTTCCAAGGAAAGCATCTTACCCAAACGTAATTCAGATAAACTTATTGCACGCAAAAAGGACTGGGATCCGAAAA
AGTATGGAGGCTTCGACAGTCCAACCGTAGCCTACTCTGTTCTCGTTGTAGCGAAAGTAGAAAAGGGTAAATCCAAG
AAACTGAAATCTGTCAAGGAGTTGCTTGGAATCACCATTATGGAGCGTAGCTCCTTCGAGAAGAACCCGATTGACTT
TCTGGAAGCCAAAGGATATAAAGAGGTCAAGAAAGATCTTATCATTAAGCTGCCTAAGTATTCACTCTTCGAGCTGG
AAAATGGTCGTAAACGCATGCTCGCTTCTGCCGGCGAGTTGCAGAAGGGCAATGAATTAGCACTTCCATCAAAGTAC
GTTAACTTCCTGTATTTGGCCAGCCATTACGAGAAACTGAAGGGGTCTCCAGAGGACAACGAACAGAAACAATTATT
TGTAGAGCAGCACAAGCATTATCTTGATGAAATCATTGAGCAAATTTCCGAATTCAGTAAACGCGTAATCCTGGCCG
ATGCAAACCTCGACAAGGTGCTGAGCGCTTACAATAAGCATCGCGACAAACCTATCCGTGAGCAGGCTGAAAATATC
ATTCACCTGTTCACATTAACGAACCTGGGCGCTCCGGCCGCTTTTAAATATTTCGACACGACAATCGACCGTAAGCG
CTATACCAGTACGAAAGAAGTGTTGGATGCGACCCTTATTCACCAGTCAATTACAGGATTATATGAGACCCGTATCG
ACCTTAGCCAATTAGGTGGGGATGCGCCAGCGCCTGCTCCTGCACCCGCTCCAGCTCCTGCCCCAGCTCCAGCGCCC
GCTCCTGCACCTGCGATGGTGAGCAAAGGTGAAGAGGATAATATGGCCATCATCAAAGAATTCATGCGCTTCAAAGT
TCATATGGAAGGTAGCGTTAATGGCCACGAATTTGAAATTGAAGGTGAAGGCGAAGGTCGTCCGTATGAAGGCACCC
AGACCGCAAAACTGAAAGTTACCAAAGGTGGTCCGCTGCCGTTTGCATGGGATATTCTGAGTCCGCAGTTTATGTAT
GGTAGCAAAGCCTATGTTAAACATCCGGCAGATATCCCGGATTATCTGAAACTGAGCTTTCCGGAAGGTTTTAAATG
GGAACGTGTGATGAATTTTGAAGATGGTGGTGTTGTTACCGTTACACAGGATAGCAGCCTGCAGGATGGTGAATTTA
TCTATAAAGTTAAACTGCGTGGCACGAATTTTCCGAGTGATGGTCCGGTTATGCAGAAAAAAACCATGGGTTGGGAA
GCAAGCAGCGAACGTATGTATCCGGAAGATGGCGCACTGAAAGGTGAAATTAAACAGCGTCTGAAGCTGAAAGATGG
CGGTCATTATGATGCAGAAGTTAAAACCACCTACAAAGCCAAAAAACCGGTTCAGCTGCCTGGTGCATATAACGTTA
ACATTAAACTGGATATCACCAGCCACAACGAGGATTATACCATTGTTGAACAGTATGAACGTGCAGAAGGTCGCCAT
AGTACCGGTGGTATGGATGAACTGTATAAA
(Cas9-APAPAPAPAPAPAPAPAPAPAPAPA(SEQ ID NO: 21)-mCherry chimera DNA sequence)
SEQ ID NO: 385
ATGGACAAAAAGTACTCTATTGGCCTGGATATCGGGACCAACAGCGTCGGGTGGGCTGTTATCACCGACGAGTATAA
AGTACCTTCGAAAAAGTTCAAAGTGCTGGGCAACACCGATCGCCATTCAATCAAAAAGAACTTGATTGGTGCGCTGT
TGTTTGACTCCGGGGAAACCGCCGAGGCGACTCGCCTTAAACGTACAGCACGTCGCCGGTACACTCGGCGTAAGAAT
CGCATTTGCTATTTGCAGGAAATCTTTAGCAACGAGATGGCAAAAGTCGATGACTCGTTTTTCCACCGCCTCGAGGA
AAGCTTTCTGGTGGAGGAAGACAAAAAGCATGAGCGTCACCCGATCTTCGGCAACATTGTCGATGAAGTAGCGTATC
ATGAAAAATACCCAACCATTTACCACTTACGCAAAAAGCTGGTGGACAGCACTGACAAAGCTGATTTGCGCCTTATC
TATTTAGCCCTGGCACATATGATTAAGTTTCGTGGTCACTTCCTGATCGAAGGAGACTTAAATCCCGACAACAGTGA
TGTTGATAAATTGTTTATTCAGCTTGTCCAAACTTACAATCAACTGTTCGAGGAAAACCCGATCAATGCCTCCGGTG
TGGATGCAAAAGCCATTTTAAGTGCACGCCTTAGCAAGTCCCGTCGCTTAGAAAACCTTATCGCGCAGCTGCCCGGC
GAGAAAAAGAATGGTTTGTTTGGGAACCTTATTGCCTTGAGCTTAGGCCTCACCCCGAATTTCAAAAGTAATTTCGA
TCTTGCAGAAGACGCCAAATTACAACTGTCGAAGGATACTTATGATGACGATCTCGATAATCTGTTAGCGCAGATTG
GTGACCAATACGCCGATCTTTTTCTGGCGGCTAAAAATCTGAGCGACGCCATCTTGCTTTCGGATATTCTCCGCGTT
AACACCGAAATCACGAAAGCGCCTCTTAGTGCCAGCATGATTAAACGTTATGATGAACACCACCAGGACCTGACCTT
ACTCAAAGCGTTGGTTCGCCAGCAACTGCCAGAGAAGTACAAAGAAATCTTCTTTGATCAGTCAAAGAATGGTTATG
CCGGCTATATTGACGGGGGTGCAAGCCAAGAGGAATTCTACAAATTTATCAAGCCTATTCTGGAGAAAATGGATGGC
ACCGAAGAGTTATTGGTGAAGCTTAACCGTGAAGACCTCCTGCGGAAACAGCGCACATTCGATAATGGTTCGATCCC
ACACCAAATCCATTTGGGGGAGTTACACGCTATTTTGCGTCGCCAGGAAGACTTTTACCCTTTCCTGAAGGATAACC
GGGAGAAAATTGAGAAGATCCTTACCTTTCGTATTCCGTATTACGTAGGCCCCTTAGCACGGGGTAATAGCCGTTTC
GCGTGGATGACACGGAAGTCGGAAGAGACGATCACCCCGTGGAACTTCGAAGAGGTAGTCGACAAGGGCGCATCAGC
GCAGTCTTTTATTGAACGTATGACGAATTTCGATAAAAACTTGCCCAATGAGAAGGTGCTTCCGAAACATTCCTTGT
TATATGAATATTTTACAGTTTACAACGAGCTGACCAAGGTTAAATACGTGACGGAAGGAATGCGCAAGCCCGCTTTT
CTTAGCGGTGAGCAAAAAAAGGCGATCGTCGACCTGTTATTCAAAACGAATCGTAAGGTGACTGTAAAGCAACTCAA
AGAAGATTACTTCAAAAAGATTGAGTGCTTCGACAGCGTCGAAATCTCTGGGGTAGAGGATCGGTTTAACGCAAGTT
TAGGTACCTACCATGACCTGCTTAAAATCATTAAGGATAAAGACTTCTTAGATAATGAAGAGAACGAAGATATTCTC
GAGGACATCGTCTTGACGTTAACCTTATTTGAGGATCGTGAAATGATTGAGGAACGCCTCAAAACTTATGCCCACCT
GTTCGACGATAAGGTGATGAAGCAGCTGAAACGTCGGCGCTACACAGGATGGGGCCGCTTGAGTCGCAAACTTATTA
ACGGAATCCGTGACAAGCAATCCGGCAAAACGATTCTGGATTTCTTGAAGTCGGACGGATTTGCTAATCGCAACTTC
ATGCAGTTGATCCATGATGACTCCCTGACTTTTAAAGAGGATATTCAAAAGGCGCAGGTTAGTGGTCAAGGCGACAG
CTTACACGAACACATCGCAAATTTGGCTGGTTCGCCGGCCATTAAAAAGGGGATCCTCCAGACCGTGAAAGTTGTAG
ATGAGCTTGTTAAGGTCATGGGTCGTCATAAGCCCGAAAACATCGTGATTGAAATGGCGCGGGAGAATCAAACGACC
CAGAAAGGACAAAAGAATAGCCGTGAACGGATGAAGCGGATCGAGGAAGGCATTAAAGAGCTGGGGTCTCAAATCTT
GAAGGAACACCCTGTGGAGAACACTCAGCTCCAAAATGAAAAACTTTACCTGTACTATTTGCAGAACGGACGCGATA
TGTACGTGGACCAAGAGTTGGATATTAATCGGCTGAGTGACTACGACGTTGATCATATCGTCCCGCAGAGCTTCCTC
AAAGACGATTCTATTGACAATAAGGTACTGACGCGCTCTGATAAAAACCGTGGTAAGTCGGACAACGTGCCCTCCGA
AGAGGTTGTGAAAAAGATGAAAAATTATTGGCGCCAGCTTTTAAACGCGAAGCTGATCACACAACGTAAATTCGATA
ATTTGACCAAGGCTGAACGGGGTGGCCTGAGCGAGTTAGATAAGGCAGGATTTATTAAACGCCAGTTAGTGGAGACT
CGTCAAATCACCAAACATGTCGCGCAGATTTTGGACAGCCGGATGAACACCAAGTACGATGAAAATGACAAACTGAT
CCGTGAGGTGAAAGTCATTACTCTGAAGTCCAAATTAGTTAGTGATTTCCGGAAGGACTTTCAATTCTACAAAGTCC
GTGAAATTAATAACTATCATCACGCACATGACGCGTACCTGAATGCAGTGGTTGGGACCGCCCTTATCAAGAAATAT
CCTAAGCTGGAGTCGGAGTTTGTCTATGGCGACTATAAGGTATACGATGTTCGCAAAATGATTGCGAAATCTGAGCA
GGAGATCGGTAAGGCAACCGCAAAATATTTCTTTTACTCAAACATTATGAATTTCTTTAAGACAGAAATCACTCTGG
CCAACGGGGAGATTCGCAAACGTCCGTTGATCGAAACAAACGGCGAGACTGGCGAAATTGTTTGGGACAAAGGGCGT
GATTTCGCGACGGTGCGCAAGGTACTGAGCATGCCTCAAGTCAATATTGTTAAGAAAACCGAAGTGCAGACGGGCGG
GTTTTCCAAGGAAAGCATCTTACCCAAACGTAATTCAGATAAACTTATTGCACGCAAAAAGGACTGGGATCCGAAAA
AGTATGGAGGCTTCGACAGTCCAACCGTAGCCTACTCTGTTCTCGTTGTAGCGAAAGTAGAAAAGGGTAAATCCAAG
AAACTGAAATCTGTCAAGGAGTTGCTTGGAATCACCATTATGGAGCGTAGCTCCTTCGAGAAGAACCCGATTGACTT
TCTGGAAGCCAAAGGATATAAAGAGGTCAAGAAAGATCTTATCATTAAGCTGCCTAAGTATTCACTCTTCGAGCTGG
AAAATGGTCGTAAACGCATGCTCGCTTCTGCCGGCGAGTTGCAGAAGGGCAATGAATTAGCACTTCCATCAAAGTAC
GTTAACTTCCTGTATTTGGCCAGCCATTACGAGAAACTGAAGGGGTCTCCAGAGGACAACGAACAGAAACAATTATT
TGTAGAGCAGCACAAGCATTATCTTGATGAAATCATTGAGCAAATTTCCGAATTCAGTAAACGCGTAATCCTGGCCG
ATGCAAACCTCGACAAGGTGCTGAGCGCTTACAATAAGCATCGCGACAAACCTATCCGTGAGCAGGCTGAAAATATC
ATTCACCTGTTCACATTAACGAACCTGGGCGCTCCGGCCGCTTTTAAATATTTCGACACGACAATCGACCGTAAGCG
CTATACCAGTACGAAAGAAGTGTTGGATGCGACCCTTATTCACCAGTCAATTACAGGATTATATGAGACCCGTATCG
ACCTTAGCCAATTAGGTGGGGATGCGCCAGCGCCTGCTCCTGCACCCGCTCCAGCTCCTGCCCCAGCTCCAGCGCCC
GCTCCTGCTCCTGCACCTGCGATGGTGAGCAAAGGTGAAGAGGATAATATGGCCATCATCAAAGAATTCATGCGCTT
CAAAGTTCATATGGAAGGTAGCGTTAATGGCCACGAATTTGAAATTGAAGGTGAAGGCGAAGGTCGTCCGTATGAAG
GCACCCAGACCGCAAAACTGAAAGTTACCAAAGGTGGTCCGCTGCCGTTTGCATGGGATATTCTGAGTCCGCAGTTT
ATGTATGGTAGCAAAGCCTATGTTAAACATCCGGCAGATATCCCGGATTATCTGAAACTGAGCTTTCCGGAAGGTTT
TAAATGGGAACGTGTGATGAATTTTGAAGATGGTGGTGTTGTTACCGTTACACAGGATAGCAGCCTGCAGGATGGTG
AATTTATCTATAAAGTTAAACTGCGTGGCACGAATTTTCCGAGTGATGGTCCGGTTATGCAGAAAAAAACCATGGGT
TGGGAAGCAAGCAGCGAACGTATGTATCCGGAAGATGGCGCACTGAAAGGTGAAATTAAACAGCGTCTGAAGCTGAA
AGATGGCGGTCATTATGATGCAGAAGTTAAAACCACCTACAAAGCCAAAAAACCGGTTCAGCTGCCTGGTGCATATA
ACGTTAACATTAAACTGGATATCACCAGCCACAACGAGGATTATACCATTGTTGAACAGTATGAACGTGCAGAAGGT
CGCCATAGTACCGGTGGTATGGATGAACTGTATAAA
(Cas9-APAPAPAPAPAPAPAPAPAPAPAPAPA(SEQ ID NO: 22)-mCherry chimera DNA sequence)
SEQ ID NO: 386
ATGGACAAAAAGTACTCTATTGGCCTGGATATCGGGACCAACAGCGTCGGGTGGGCTGTTATCACCGACGAGTATAA
AGTACCTTCGAAAAAGTTCAAAGTGCTGGGCAACACCGATCGCCATTCAATCAAAAAGAACTTGATTGGTGCGCTGT
TGTTTGACTCCGGGGAAACCGCCGAGGCGACTCGCCTTAAACGTACAGCACGTCGCCGGTACACTCGGCGTAAGAAT
CGCATTTGCTATTTGCAGGAAATCTTTAGCAACGAGATGGCAAAAGTCGATGACTCGTTTTTCCACCGCCTCGAGGA
AAGCTTTCTGGTGGAGGAAGACAAAAAGCATGAGCGTCACCCGATCTTCGGCAACATTGTCGATGAAGTAGCGTATC
ATGAAAAATACCCAACCATTTACCACTTACGCAAAAAGCTGGTGGACAGCACTGACAAAGCTGATTTGCGCCTTATC
TATTTAGCCCTGGCACATATGATTAAGTTTCGTGGTCACTTCCTGATCGAAGGAGACTTAAATCCCGACAACAGTGA
TGTTGATAAATTGTTTATTCAGCTTGTCCAAACTTACAATCAACTGTTCGAGGAAAACCCGATCAATGCCTCCGGTG
TGGATGCAAAAGCCATTTTAAGTGCACGCCTTAGCAAGTCCCGTCGCTTAGAAAACCTTATCGCGCAGCTGCCCGGC
GAGAAAAAGAATGGTTTGTTTGGGAACCTTATTGCCTTGAGCTTAGGCCTCACCCCGAATTTCAAAAGTAATTTCGA
TCTTGCAGAAGACGCCAAATTACAACTGTCGAAGGATACTTATGATGACGATCTCGATAATCTGTTAGCGCAGATTG
GTGACCAATACGCCGATCTTTTTCTGGCGGCTAAAAATCTGAGCGACGCCATCTTGCTTTCGGATATTCTCCGCGTT
AACACCGAAATCACGAAAGCGCCTCTTAGTGCCAGCATGATTAAACGTTATGATGAACACCACCAGGACCTGACCTT
ACTCAAAGCGTTGGTTCGCCAGCAACTGCCAGAGAAGTACAAAGAAATCTTCTTTGATCAGTCAAAGAATGGTTATG
CCGGCTATATTGACGGGGGTGCAAGCCAAGAGGAATTCTACAAATTTATCAAGCCTATTCTGGAGAAAATGGATGGC
ACCGAAGAGTTATTGGTGAAGCTTAACCGTGAAGACCTCCTGCGGAAACAGCGCACATTCGATAATGGTTCGATCCC
ACACCAAATCCATTTGGGGGAGTTACACGCTATTTTGCGTCGCCAGGAAGACTTTTACCCTTTCCTGAAGGATAACC
GGGAGAAAATTGAGAAGATCCTTACCTTTCGTATTCCGTATTACGTAGGCCCCTTAGCACGGGGTAATAGCCGTTTC
GCGTGGATGACACGGAAGTCGGAAGAGACGATCACCCCGTGGAACTTCGAAGAGGTAGTCGACAAGGGCGCATCAGC
GCAGTCTTTTATTGAACGTATGACGAATTTCGATAAAAACTTGCCCAATGAGAAGGTGCTTCCGAAACATTCCTTGT
TATATGAATATTTTACAGTTTACAACGAGCTGACCAAGGTTAAATACGTGACGGAAGGAATGCGCAAGCCCGCTTTT
CTTAGCGGTGAGCAAAAAAAGGCGATCGTCGACCTGTTATTCAAAACGAATCGTAAGGTGACTGTAAAGCAACTCAA
AGAAGATTACTTCAAAAAGATTGAGTGCTTCGACAGCGTCGAAATCTCTGGGGTAGAGGATCGGTTTAACGCAAGTT
TAGGTACCTACCATGACCTGCTTAAAATCATTAAGGATAAAGACTTCTTAGATAATGAAGAGAACGAAGATATTCTC
GAGGACATCGTCTTGACGTTAACCTTATTTGAGGATCGTGAAATGATTGAGGAACGCCTCAAAACTTATGCCCACCT
GTTCGACGATAAGGTGATGAAGCAGCTGAAACGTCGGCGCTACACAGGATGGGGCCGCTTGAGTCGCAAACTTATTA
ACGGAATCCGTGACAAGCAATCCGGCAAAACGATTCTGGATTTCTTGAAGTCGGACGGATTTGCTAATCGCAACTTC
ATGCAGTTGATCCATGATGACTCCCTGACTTTTAAAGAGGATATTCAAAAGGCGCAGGTTAGTGGTCAAGGCGACAG
CTTACACGAACACATCGCAAATTTGGCTGGTTCGCCGGCCATTAAAAAGGGGATCCTCCAGACCGTGAAAGTTGTAG
ATGAGCTTGTTAAGGTCATGGGTCGTCATAAGCCCGAAAACATCGTGATTGAAATGGCGCGGGAGAATCAAACGACC
CAGAAAGGACAAAAGAATAGCCGTGAACGGATGAAGCGGATCGAGGAAGGCATTAAAGAGCTGGGGTCTCAAATCTT
GAAGGAACACCCTGTGGAGAACACTCAGCTCCAAAATGAAAAACTTTACCTGTACTATTTGCAGAACGGACGCGATA
TGTACGTGGACCAAGAGTTGGATATTAATCGGCTGAGTGACTACGACGTTGATCATATCGTCCCGCAGAGCTTCCTC
AAAGACGATTCTATTGACAATAAGGTACTGACGCGCTCTGATAAAAACCGTGGTAAGTCGGACAACGTGCCCTCCGA
AGAGGTTGTGAAAAAGATGAAAAATTATTGGCGCCAGCTTTTAAACGCGAAGCTGATCACACAACGTAAATTCGATA
ATTTGACCAAGGCTGAACGGGGTGGCCTGAGCGAGTTAGATAAGGCAGGATTTATTAAACGCCAGTTAGTGGAGACT
CGTCAAATCACCAAACATGTCGCGCAGATTTTGGACAGCCGGATGAACACCAAGTACGATGAAAATGACAAACTGAT
CCGTGAGGTGAAAGTCATTACTCTGAAGTCCAAATTAGTTAGTGATTTCCGGAAGGACTTTCAATTCTACAAAGTCC
GTGAAATTAATAACTATCATCACGCACATGACGCGTACCTGAATGCAGTGGTTGGGACCGCCCTTATCAAGAAATAT
CCTAAGCTGGAGTCGGAGTTTGTCTATGGCGACTATAAGGTATACGATGTTCGCAAAATGATTGCGAAATCTGAGCA
GGAGATCGGTAAGGCAACCGCAAAATATTTCTTTTACTCAAACATTATGAATTTCTTTAAGACAGAAATCACTCTGG
CCAACGGGGAGATTCGCAAACGTCCGTTGATCGAAACAAACGGCGAGACTGGCGAAATTGTTTGGGACAAAGGGCGT
GATTTCGCGACGGTGCGCAAGGTACTGAGCATGCCTCAAGTCAATATTGTTAAGAAAACCGAAGTGCAGACGGGCGG
GTTTTCCAAGGAAAGCATCTTACCCAAACGTAATTCAGATAAACTTATTGCACGCAAAAAGGACTGGGATCCGAAAA
AGTATGGAGGCTTCGACAGTCCAACCGTAGCCTACTCTGTTCTCGTTGTAGCGAAAGTAGAAAAGGGTAAATCCAAG
AAACTGAAATCTGTCAAGGAGTTGCTTGGAATCACCATTATGGAGCGTAGCTCCTTCGAGAAGAACCCGATTGACTT
TCTGGAAGCCAAAGGATATAAAGAGGTCAAGAAAGATCTTATCATTAAGCTGCCTAAGTATTCACTCTTCGAGCTGG
AAAATGGTCGTAAACGCATGCTCGCTTCTGCCGGCGAGTTGCAGAAGGGCAATGAATTAGCACTTCCATCAAAGTAC
GTTAACTTCCTGTATTTGGCCAGCCATTACGAGAAACTGAAGGGGTCTCCAGAGGACAACGAACAGAAACAATTATT
TGTAGAGCAGCACAAGCATTATCTTGATGAAATCATTGAGCAAATTTCCGAATTCAGTAAACGCGTAATCCTGGCCG
ATGCAAACCTCGACAAGGTGCTGAGCGCTTACAATAAGCATCGCGACAAACCTATCCGTGAGCAGGCTGAAAATATC
ATTCACCTGTTCACATTAACGAACCTGGGCGCTCCGGCCGCTTTTAAATATTTCGACACGACAATCGACCGTAAGCG
CTATACCAGTACGAAAGAAGTGTTGGATGCGACCCTTATTCACCAGTCAATTACAGGATTATATGAGACCCGTATCG
ACCTTAGCCAATTAGGTGGGGATGCGCCAGCGCCTGCTCCTGCACCCGCTCCAGCTCCTGCCCCAGCTCCAGCGCCC
GCTCCTGCGCCAGCTCCTGCACCTGCGATGGTGAGCAAAGGTGAAGAGGATAATATGGCCATCATCAAAGAATTCAT
GCGCTTCAAAGTTCATATGGAAGGTAGCGTTAATGGCCACGAATTTGAAATTGAAGGTGAAGGCGAAGGTCGTCCGT
ATGAAGGCACCCAGACCGCAAAACTGAAAGTTACCAAAGGTGGTCCGCTGCCGTTTGCATGGGATATTCTGAGTCCG
CAGTTTATGTATGGTAGCAAAGCCTATGTTAAACATCCGGCAGATATCCCGGATTATCTGAAACTGAGCTTTCCGGA
AGGTTTTAAATGGGAACGTGTGATGAATTTTGAAGATGGTGGTGTTGTTACCGTTACACAGGATAGCAGCCTGCAGG
ATGGTGAATTTATCTATAAAGTTAAACTGCGTGGCACGAATTTTCCGAGTGATGGTCCGGTTATGCAGAAAAAAACC
ATGGGTTGGGAAGCAAGCAGCGAACGTATGTATCCGGAAGATGGCGCACTGAAAGGTGAAATTAAACAGCGTCTGAA
GCTGAAAGATGGCGGTCATTATGATGCAGAAGTTAAAACCACCTACAAAGCCAAAAAACCGGTTCAGCTGCCTGGTG
CATATAACGTTAACATTAAACTGGATATCACCAGCCACAACGAGGATTATACCATTGTTGAACAGTATGAACGTGCA
GAAGGTCGCCATAGTACCGGTGGTATGGATGAACTGTATAAA
(Cas9-APAPAPAPAPAPAPAPAPAPAPAPAPAPA(SEQ ID NO: 23)-
mCherry chimera DNA sequence)
SEQ ID NO: 387
ATGGACAAAAAGTACTCTATTGGCCTGGATATCGGGACCAACAGCGTCGGGTGGGCTGTTATCACCGACGAGTATAA
AGTACCTTCGAAAAAGTTCAAAGTGCTGGGCAACACCGATCGCCATTCAATCAAAAAGAACTTGATTGGTGCGCTGT
TGTTTGACTCCGGGGAAACCGCCGAGGCGACTCGCCTTAAACGTACAGCACGTCGCCGGTACACTCGGCGTAAGAAT
CGCATTTGCTATTTGCAGGAAATCTTTAGCAACGAGATGGCAAAAGTCGATGACTCGTTTTTCCACCGCCTCGAGGA
AAGCTTTCTGGTGGAGGAAGACAAAAAGCATGAGCGTCACCCGATCTTCGGCAACATTGTCGATGAAGTAGCGTATC
ATGAAAAATACCCAACCATTTACCACTTACGCAAAAAGCTGGTGGACAGCACTGACAAAGCTGATTTGCGCCTTATC
TATTTAGCCCTGGCACATATGATTAAGTTTCGTGGTCACTTCCTGATCGAAGGAGACTTAAATCCCGACAACAGTGA
TGTTGATAAATTGTTTATTCAGCTTGTCCAAACTTACAATCAACTGTTCGAGGAAAACCCGATCAATGCCTCCGGTG
TGGATGCAAAAGCCATTTTAAGTGCACGCCTTAGCAAGTCCCGTCGCTTAGAAAACCTTATCGCGCAGCTGCCCGGC
GAGAAAAAGAATGGTTTGTTTGGGAACCTTATTGCCTTGAGCTTAGGCCTCACCCCGAATTTCAAAAGTAATTTCGA
TCTTGCAGAAGACGCCAAATTACAACTGTCGAAGGATACTTATGATGACGATCTCGATAATCTGTTAGCGCAGATTG
GTGACCAATACGCCGATCTTTTTCTGGCGGCTAAAAATCTGAGCGACGCCATCTTGCTTTCGGATATTCTCCGCGTT
AACACCGAAATCACGAAAGCGCCTCTTAGTGCCAGCATGATTAAACGTTATGATGAACACCACCAGGACCTGACCTT
ACTCAAAGCGTTGGTTCGCCAGCAACTGCCAGAGAAGTACAAAGAAATCTTCTTTGATCAGTCAAAGAATGGTTATG
CCGGCTATATTGACGGGGGTGCAAGCCAAGAGGAATTCTACAAATTTATCAAGCCTATTCTGGAGAAAATGGATGGC
ACCGAAGAGTTATTGGTGAAGCTTAACCGTGAAGACCTCCTGCGGAAACAGCGCACATTCGATAATGGTTCGATCCC
ACACCAAATCCATTTGGGGGAGTTACACGCTATTTTGCGTCGCCAGGAAGACTTTTACCCTTTCCTGAAGGATAACC
GGGAGAAAATTGAGAAGATCCTTACCTTTCGTATTCCGTATTACGTAGGCCCCTTAGCACGGGGTAATAGCCGTTTC
GCGTGGATGACACGGAAGTCGGAAGAGACGATCACCCCGTGGAACTTCGAAGAGGTAGTCGACAAGGGCGCATCAGC
GCAGTCTTTTATTGAACGTATGACGAATTTCGATAAAAACTTGCCCAATGAGAAGGTGCTTCCGAAACATTCCTTGT
TATATGAATATTTTACAGTTTACAACGAGCTGACCAAGGTTAAATACGTGACGGAAGGAATGCGCAAGCCCGCTTTT
CTTAGCGGTGAGCAAAAAAAGGCGATCGTCGACCTGTTATTCAAAACGAATCGTAAGGTGACTGTAAAGCAACTCAA
AGAAGATTACTTCAAAAAGATTGAGTGCTTCGACAGCGTCGAAATCTCTGGGGTAGAGGATCGGTTTAACGCAAGTT
TAGGTACCTACCATGACCTGCTTAAAATCATTAAGGATAAAGACTTCTTAGATAATGAAGAGAACGAAGATATTCTC
GAGGACATCGTCTTGACGTTAACCTTATTTGAGGATCGTGAAATGATTGAGGAACGCCTCAAAACTTATGCCCACCT
GTTCGACGATAAGGTGATGAAGCAGCTGAAACGTCGGCGCTACACAGGATGGGGCCGCTTGAGTCGCAAACTTATTA
ACGGAATCCGTGACAAGCAATCCGGCAAAACGATTCTGGATTTCTTGAAGTCGGACGGATTTGCTAATCGCAACTTC
ATGCAGTTGATCCATGATGACTCCCTGACTTTTAAAGAGGATATTCAAAAGGCGCAGGTTAGTGGTCAAGGCGACAG
CTTACACGAACACATCGCAAATTTGGCTGGTTCGCCGGCCATTAAAAAGGGGATCCTCCAGACCGTGAAAGTTGTAG
ATGAGCTTGTTAAGGTCATGGGTCGTCATAAGCCCGAAAACATCGTGATTGAAATGGCGCGGGAGAATCAAACGACC
CAGAAAGGACAAAAGAATAGCCGTGAACGGATGAAGCGGATCGAGGAAGGCATTAAAGAGCTGGGGTCTCAAATCTT
GAAGGAACACCCTGTGGAGAACACTCAGCTCCAAAATGAAAAACTTTACCTGTACTATTTGCAGAACGGACGCGATA
TGTACGTGGACCAAGAGTTGGATATTAATCGGCTGAGTGACTACGACGTTGATCATATCGTCCCGCAGAGCTTCCTC
AAAGACGATTCTATTGACAATAAGGTACTGACGCGCTCTGATAAAAACCGTGGTAAGTCGGACAACGTGCCCTCCGA
AGAGGTTGTGAAAAAGATGAAAAATTATTGGCGCCAGCTTTTAAACGCGAAGCTGATCACACAACGTAAATTCGATA
ATTTGACCAAGGCTGAACGGGGTGGCCTGAGCGAGTTAGATAAGGCAGGATTTATTAAACGCCAGTTAGTGGAGACT
CGTCAAATCACCAAACATGTCGCGCAGATTTTGGACAGCCGGATGAACACCAAGTACGATGAAAATGACAAACTGAT
CCGTGAGGTGAAAGTCATTACTCTGAAGTCCAAATTAGTTAGTGATTTCCGGAAGGACTTTCAATTCTACAAAGTCC
GTGAAATTAATAACTATCATCACGCACATGACGCGTACCTGAATGCAGTGGTTGGGACCGCCCTTATCAAGAAATAT
CCTAAGCTGGAGTCGGAGTTTGTCTATGGCGACTATAAGGTATACGATGTTCGCAAAATGATTGCGAAATCTGAGCA
GGAGATCGGTAAGGCAACCGCAAAATATTTCTTTTACTCAAACATTATGAATTTCTTTAAGACAGAAATCACTCTGG
CCAACGGGGAGATTCGCAAACGTCCGTTGATCGAAACAAACGGCGAGACTGGCGAAATTGTTTGGGACAAAGGGCGT
GATTTCGCGACGGTGCGCAAGGTACTGAGCATGCCTCAAGTCAATATTGTTAAGAAAACCGAAGTGCAGACGGGCGG
GTTTTCCAAGGAAAGCATCTTACCCAAACGTAATTCAGATAAACTTATTGCACGCAAAAAGGACTGGGATCCGAAAA
AGTATGGAGGCTTCGACAGTCCAACCGTAGCCTACTCTGTTCTCGTTGTAGCGAAAGTAGAAAAGGGTAAATCCAAG
AAACTGAAATCTGTCAAGGAGTTGCTTGGAATCACCATTATGGAGCGTAGCTCCTTCGAGAAGAACCCGATTGACTT
TCTGGAAGCCAAAGGATATAAAGAGGTCAAGAAAGATCTTATCATTAAGCTGCCTAAGTATTCACTCTTCGAGCTGG
AAAATGGTCGTAAACGCATGCTCGCTTCTGCCGGCGAGTTGCAGAAGGGCAATGAATTAGCACTTCCATCAAAGTAC
GTTAACTTCCTGTATTTGGCCAGCCATTACGAGAAACTGAAGGGGTCTCCAGAGGACAACGAACAGAAACAATTATT
TGTAGAGCAGCACAAGCATTATCTTGATGAAATCATTGAGCAAATTTCCGAATTCAGTAAACGCGTAATCCTGGCCG
ATGCAAACCTCGACAAGGTGCTGAGCGCTTACAATAAGCATCGCGACAAACCTATCCGTGAGCAGGCTGAAAATATC
ATTCACCTGTTCACATTAACGAACCTGGGCGCTCCGGCCGCTTTTAAATATTTCGACACGACAATCGACCGTAAGCG
CTATACCAGTACGAAAGAAGTGTTGGATGCGACCCTTATTCACCAGTCAATTACAGGATTATATGAGACCCGTATCG
ACCTTAGCCAATTAGGTGGGGATGCGCCAGCGCCTGCTCCTGCACCCGCTCCAGCTCCTGCCCCAGCTCCAGCGCCC
GCTCCTGCGCCAGCTCCTGCACCTGCTCCAGCGATGGTGAGCAAAGGTGAAGAGGATAATATGGCCATCATCAAAGA
ATTCATGCGCTTCAAAGTTCATATGGAAGGTAGCGTTAATGGCCACGAATTTGAAATTGAAGGTGAAGGCGAAGGTC
GTCCGTATGAAGGCACCCAGACCGCAAAACTGAAAGTTACCAAAGGTGGTCCGCTGCCGTTTGCATGGGATATTCTG
AGTCCGCAGTTTATGTATGGTAGCAAAGCCTATGTTAAACATCCGGCAGATATCCCGGATTATCTGAAACTGAGCTT
TCCGGAAGGTTTTAAATGGGAACGTGTGATGAATTTTGAAGATGGTGGTGTTGTTACCGTTACACAGGATAGCAGCC
TGCAGGATGGTGAATTTATCTATAAAGTTAAACTGCGTGGCACGAATTTTCCGAGTGATGGTCCGGTTATGCAGAAA
AAAACCATGGGTTGGGAAGCAAGCAGCGAACGTATGTATCCGGAAGATGGCGCACTGAAAGGTGAAATTAAACAGCG
TCTGAAGCTGAAAGATGGCGGTCATTATGATGCAGAAGTTAAAACCACCTACAAAGCCAAAAAACCGGTTCAGCTGC
CTGGTGCATATAACGTTAACATTAAACTGGATATCACCAGCCACAACGAGGATTATACCATTGTTGAACAGTATGAA
CGTGCAGAAGGTCGCCATAGTACCGGTGGTATGGATGAACTGTATAAA
Exemplary DNA sequences encoding LbCas12a (E795L) variant protein amino
acid chimeras
(LbCas12a (E795L)-eGFP chimera DNA sequence)
SEQ ID NO: 388
ATGAGCAAACTGGAAAAGTTCACCAACTGTTATAGCCTGAGCAAAACCCTGCGTTTTAAAGCAATTCCGGTTGGTAA
AACCCAAGAGAACATTGATAATAAACGCCTGCTGGTCGAAGATGAAAAACGCGCTGAAGATTATAAAGGCGTGAAAA
AACTGCTGGATCGCTATTATCTGAGCTTCATTAACGATGTGCTGCACAGCATTAAACTGAAGAACCTGAACAACTAT
ATCAGCCTGTTTCGTAAAAAAACCCGCACCGAAAAAGAAAACAAAGAGCTGGAAAACCTGGAAATCAATCTGCGTAA
AGAAATCGCCAAAGCGTTTAAAGGTAACGAGGGTTATAAAAGCCTGTTCAAGAAAGACATCATCGAAACCATTCTGC
CGGAATTTCTGGATGATAAAGATGAAATTGCCCTGGTGAATAGCTTTAATGGCTTTACCACCGCATTTACCGGCTTT
TTTGATAATCGCGAAAACATGTTCAGCGAAGAAGCAAAAAGCACCAGCATTGCATTTCGCTGCATTAATGAAAATCT
GACCCGCTACATTAGCAACATGGATATCTTTGAAAAAGTGGACGCGATCTTCGATAAACACGAAGTGCAAGAGATCA
AAGAGAAAATCCTGAACAGCGATTATGACGTCGAAGATTTTTTTGAAGGCGAGTTCTTTAACTTCGTTCTGACCCAA
GAAGGTATCGACGTTTATAACGCAATTATTGGTGGTTTTGTTACCGAAAGCGGTGAGAAAATCAAAGGCCTGAATGA
ATATATCAACCTGTATAACCAGAAAACCAAACAGAAACTGCCGAAATTCAAACCGCTGTATAAACAGGTTCTGAGCG
ATCGTGAAAGCCTGAGCTTTTATGGTGAAGGTTATACCAGTGATGAAGAGGTTCTGGAAGTTTTTCGTAACACCCTG
AATAAAAACAGCGAGATCTTTAGCAGCATCAAAAAGCTTGAGAAACTGTTCAAAAACTTTGATGAGTATAGCAGCGC
AGGCATCTTTGTTAAAAATGGTCCGGCAATTAGCACCATCAGCAAAGATATTTTTGGCGAATGGAATGTGATCCGCG
ATAAATGGAATGCCGAATATGATGATATCCACCTGAAAAAAAAGGCCGTGGTGACCGAGAAATATGAAGATGATCGT
CGTAAAAGCTTCAAGAAAATTGGTAGCTTTAGCCTGGAACAGCTGCAAGAATATGCAGATGCAGATCTGAGCGTTGT
GGAAAAACTGAAAGAAATCATCATTCAGAAGGTGGACGAGATCTATAAAGTTTATGGTAGCAGCGAAAAACTGTTCG
ATGCAGATTTTGTTCTGGAAAAAAGCCTGAAAAAGAATGATGCCGTTGTGGCCATTATGAAAGATCTGCTGGATAGC
GTTAAGAGCTTCGAGAATTACATCAAAGCCTTTTTTGGTGAGGGCAAAGAAACCAATCGTGATGAAAGTTTCTATGG
CGATTTTGTGCTGGCCTATGATATTCTGCTGAAAGTGGACCATATTTATGATGCCATTCGCAATTATGTTACCCAGA
AACCGTATAGCAAAGACAAGTTCAAACTGTACTTTCAGAACCCGCAGTTTATGGGTGGTTGGGATAAAGATAAAGAA
ACCGATTATCGTGCCACCATCCTGCGTTATGGTAGTAAATACTATCTGGCCATCATGGACAAAAAATACGCAAAATG
CCTGCAGAAAATCGACAAAGATGATGTGAATGGCAACTATGAAAAAATCAACTACAAACTGCTGCCTGGTCCGAATA
AAATGCTGCCGAAAGTGTTCTTTAGCAAGAAATGGATGGCCTATTATAACCCGAGCGAGGATATTCAAAAGATCTAC
AAAAATGGCACCTTTAAAAAGGGCGACATGTTCAATCTGAACGATTGCCACAAACTGATCGATTTCTTCAAAGATTC
AATTTCGCGTTATCCGAAATGGTCCAATGCCTATGATTTTAACTTTAGCGAAACCGAAAAATACAAAGACATTGCCG
GTTTTTATCGCGAAGTGGAAGAACAGGGCTATAAAGTGAGCTTTGAAAGCGCAAGCAAAAAAGAGGTTGATAAGCTG
GTTGAAGAGGGCAAACTGTATATGTTCCAGATTTACAACAAAGATTTTAGCGACAAAAGCCATGGCACCCCGAATCT
GCATACCATGTACTTTAAACTGCTGTTCGACGAAAATAACCATGGTCAGATTCGTCTGAGCGGTGGTGCCGAACTGT
TTATGCGTCGTGCAAGTCTGAAAAAAGAAGAACTGGTTGTTCATCCGGCAAATAGCCCGATTGCAAACAAAAATCCG
GACAATCCGAAAAAAACCACGACACTGAGCTATGATGTGTATAAAGACAAACGTTTTAGCGAGGATCAGTATCTGCT
GCATATCCCGATTGCCATCAATAAATGCCCGAAAAACATCTTTAAGATCAACACCGAAGTTCGCGTGCTGCTGAAAC
ATGATGATAATCCGTATGTGATTGGCATTGATCGTGGTGAACGTAACCTGCTGTATATTGTTGTTGTTGATGGTAAA
GGCAACATCGTGGAACAGTATAGTCTGAACGAAATTATCAACAACTTTAACGGCATCCGCATCAAAACCGACTATCA
TAGCCTGCTGGACAAGAAAGAAAAAGAACGTTTTGAAGCACGTCAGAACTGGACCAGTATTGAAAACATCAAAGAAC
TGAAAGCCGGTTATATTAGCCAGGTGGTTCATAAAATCTGTGAGCTGGTAGAAAAATACGATGCAGTTATTGCACTG
GAAGATCTGAATAGCGGTTTCAAAAATAGCCGTGTGAAAGTCGAAAAACAGGTGTATCAGAAATTCGAGAAAATGCT
GATCGACAAACTGAACTACATGGTCGACAAAAAAAGCAATCCGTGTGCAACCGGTGGTGCACTGAAAGGTTATCAGA
TTACCAACAAATTTGAAAGCTTTAAAAGCATGAGCACCCAGAACGGCTTTATCTTCTATATTCCGGCATGGCTGACC
AGCAAAATTGATCCGAGCACCGGTTTTGTGAACCTGCTGAAAACAAAATATACCTCCATTGCCGACAGCAAGAAGTT
TATTAGCAGCTTTGATCGCATTATGTATGTTCCGGAAGAGGACCTGTTTGAATTCGCACTGGATTACAAAAATTTCA
GCCGTACCGATGCCGACTACATCAAAAAATGGAAACTGTACAGCTATGGTAACCGCATTCGCATTTTTCGCAACCCG
AAGAAAAACAATGTGTTCGATTGGGAAGAAGTTTGTCTGACCAGCGCATATAAAGAACTTTTCAACAAATACGGCAT
CAACTATCAGCAGGGTGATATTCGTGCACTGCTGTGTGAACAGAGCGATAAAGCGTTTTATAGCAGTTTTATGGCAC
TGATGAGCCTGATGCTGCAGATGCGTAATAGCATTACCGGTCGCACCGATGTGGATTTTCTGATTAGTCCGGTGAAA
AATTCCGATGGCATCTTTTATGATAGCCGCAATTACGAAGCACAAGAAAATGCAATTCTGCCGAAAAACGCAGATGC
AAATGGTGCATATAACATTGCACGTAAAGTTCTGTGGGCAATTGGCCAGTTTAAGAAAGCAGAAGATGAGAAGCTGG
ACAAAGTGAAAATTGCGATCAGCAATAAAGAGTGGCTGGAATACGCACAGACCAGCGTTAAACATATGGTTAGCAAA
GGTGAAGAACTGTTTACCGGCGTTGTGCCGATTCTGGTGGAACTGGATGGTGATGTGAATGGCCATAAATTTAGCGT
TAGCGGCGAAGGCGAAGGTGATGCGACCTATGGTAAACTGACCCTGAAATTTATTTGCACCACCGGTAAACTGCCGG
TTCCGTGGCCGACCCTGGTGACCACCCTGACCTATGGCGTTCAGTGCTTTAGCCGCTATCCGGATCATATGAAACAG
CATGATTTCTTTAAAAGCGCGATGCCGGAAGGCTATGTGCAGGAACGTACCATTTTTTTCAAAGATGATGGCAACTA
TAAAACCCGTGCGGAAGTTAAATTTGAAGGCGATACCCTGGTGAACCGCATTGAACTGAAAGGTATTGATTTTAAAG
AAGATGGCAACATTCTGGGTCATAAACTGGAATATAATTACAACAGCCATAATGTGTATATTATGGCCGATAAACAG
AAAAATGGCATCAAAGTGAACTTTAAAATCCGTCACAACATTGAAGATGGTAGCGTGCAGCTGGCGGATCATTATCA
GCAGAATACCCCGATTGGTGATGGCCCGGTGCTGCTGCCGGATAATCATTATCTGAGCACCCAGAGCGCGCTGAGCA
AAGATCCGAATGAAAAACGTGATCATATGGTGCTGCTGGAATTTGTTACCGCCGCGGGCATTACCCTGGGTATGGAT
GAACTGTATAAA
(LbCas12a (E795L)-GSAGSAAGSGEF(SEQ ID NO: 6)-eGFP chimera DNA sequence)
SEQ ID NO: 389
ATGAGCAAACTGGAAAAGTTCACCAACTGTTATAGCCTGAGCAAAACCCTGCGTTTTAAAGCAATTCCGGTTGGTAA
AACCCAAGAGAACATTGATAATAAACGCCTGCTGGTCGAAGATGAAAAACGCGCTGAAGATTATAAAGGCGTGAAAA
AACTGCTGGATCGCTATTATCTGAGCTTCATTAACGATGTGCTGCACAGCATTAAACTGAAGAACCTGAACAACTAT
ATCAGCCTGTTTCGTAAAAAAACCCGCACCGAAAAAGAAAACAAAGAGCTGGAAAACCTGGAAATCAATCTGCGTAA
AGAAATCGCCAAAGCGTTTAAAGGTAACGAGGGTTATAAAAGCCTGTTCAAGAAAGACATCATCGAAACCATTCTGC
CGGAATTTCTGGATGATAAAGATGAAATTGCCCTGGTGAATAGCTTTAATGGCTTTACCACCGCATTTACCGGCTTT
TTTGATAATCGCGAAAACATGTTCAGCGAAGAAGCAAAAAGCACCAGCATTGCATTTCGCTGCATTAATGAAAATCT
GACCCGCTACATTAGCAACATGGATATCTTTGAAAAAGTGGACGCGATCTTCGATAAACACGAAGTGCAAGAGATCA
AAGAGAAAATCCTGAACAGCGATTATGACGTCGAAGATTTTTTTGAAGGCGAGTTCTTTAACTTCGTTCTGACCCAA
GAAGGTATCGACGTTTATAACGCAATTATTGGTGGTTTTGTTACCGAAAGCGGTGAGAAAATCAAAGGCCTGAATGA
ATATATCAACCTGTATAACCAGAAAACCAAACAGAAACTGCCGAAATTCAAACCGCTGTATAAACAGGTTCTGAGCG
ATCGTGAAAGCCTGAGCTTTTATGGTGAAGGTTATACCAGTGATGAAGAGGTTCTGGAAGTTTTTCGTAACACCCTG
AATAAAAACAGCGAGATCTTTAGCAGCATCAAAAAGCTTGAGAAACTGTTCAAAAACTTTGATGAGTATAGCAGCGC
AGGCATCTTTGTTAAAAATGGTCCGGCAATTAGCACCATCAGCAAAGATATTTTTGGCGAATGGAATGTGATCCGCG
ATAAATGGAATGCCGAATATGATGATATCCACCTGAAAAAAAAGGCCGTGGTGACCGAGAAATATGAAGATGATCGT
CGTAAAAGCTTCAAGAAAATTGGTAGCTTTAGCCTGGAACAGCTGCAAGAATATGCAGATGCAGATCTGAGCGTTGT
GGAAAAACTGAAAGAAATCATCATTCAGAAGGTGGACGAGATCTATAAAGTTTATGGTAGCAGCGAAAAACTGTTCG
ATGCAGATTTTGTTCTGGAAAAAAGCCTGAAAAAGAATGATGCCGTTGTGGCCATTATGAAAGATCTGCTGGATAGC
GTTAAGAGCTTCGAGAATTACATCAAAGCCTTTTTTGGTGAGGGCAAAGAAACCAATCGTGATGAAAGTTTCTATGG
CGATTTTGTGCTGGCCTATGATATTCTGCTGAAAGTGGACCATATTTATGATGCCATTCGCAATTATGTTACCCAGA
AACCGTATAGCAAAGACAAGTTCAAACTGTACTTTCAGAACCCGCAGTTTATGGGTGGTTGGGATAAAGATAAAGAA
ACCGATTATCGTGCCACCATCCTGCGTTATGGTAGTAAATACTATCTGGCCATCATGGACAAAAAATACGCAAAATG
CCTGCAGAAAATCGACAAAGATGATGTGAATGGCAACTATGAAAAAATCAACTACAAACTGCTGCCTGGTCCGAATA
AAATGCTGCCGAAAGTGTTCTTTAGCAAGAAATGGATGGCCTATTATAACCCGAGCGAGGATATTCAAAAGATCTAC
AAAAATGGCACCTTTAAAAAGGGCGACATGTTCAATCTGAACGATTGCCACAAACTGATCGATTTCTTCAAAGATTC
AATTTCGCGTTATCCGAAATGGTCCAATGCCTATGATTTTAACTTTAGCGAAACCGAAAAATACAAAGACATTGCCG
GTTTTTATCGCGAAGTGGAAGAACAGGGCTATAAAGTGAGCTTTGAAAGCGCAAGCAAAAAAGAGGTTGATAAGCTG
GTTGAAGAGGGCAAACTGTATATGTTCCAGATTTACAACAAAGATTTTAGCGACAAAAGCCATGGCACCCCGAATCT
GCATACCATGTACTTTAAACTGCTGTTCGACGAAAATAACCATGGTCAGATTCGTCTGAGCGGTGGTGCCGAACTGT
TTATGCGTCGTGCAAGTCTGAAAAAAGAAGAACTGGTTGTTCATCCGGCAAATAGCCCGATTGCAAACAAAAATCCG
GACAATCCGAAAAAAACCACGACACTGAGCTATGATGTGTATAAAGACAAACGTTTTAGCGAGGATCAGTATCTGCT
GCATATCCCGATTGCCATCAATAAATGCCCGAAAAACATCTTTAAGATCAACACCGAAGTTCGCGTGCTGCTGAAAC
ATGATGATAATCCGTATGTGATTGGCATTGATCGTGGTGAACGTAACCTGCTGTATATTGTTGTTGTTGATGGTAAA
GGCAACATCGTGGAACAGTATAGTCTGAACGAAATTATCAACAACTTTAACGGCATCCGCATCAAAACCGACTATCA
TAGCCTGCTGGACAAGAAAGAAAAAGAACGTTTTGAAGCACGTCAGAACTGGACCAGTATTGAAAACATCAAAGAAC
TGAAAGCCGGTTATATTAGCCAGGTGGTTCATAAAATCTGTGAGCTGGTAGAAAAATACGATGCAGTTATTGCACTG
GAAGATCTGAATAGCGGTTTCAAAAATAGCCGTGTGAAAGTCGAAAAACAGGTGTATCAGAAATTCGAGAAAATGCT
GATCGACAAACTGAACTACATGGTCGACAAAAAAAGCAATCCGTGTGCAACCGGTGGTGCACTGAAAGGTTATCAGA
TTACCAACAAATTTGAAAGCTTTAAAAGCATGAGCACCCAGAACGGCTTTATCTTCTATATTCCGGCATGGCTGACC
AGCAAAATTGATCCGAGCACCGGTTTTGTGAACCTGCTGAAAACAAAATATACCTCCATTGCCGACAGCAAGAAGTT
TATTAGCAGCTTTGATCGCATTATGTATGTTCCGGAAGAGGACCTGTTTGAATTCGCACTGGATTACAAAAATTTCA
GCCGTACCGATGCCGACTACATCAAAAAATGGAAACTGTACAGCTATGGTAACCGCATTCGCATTTTTCGCAACCCG
AAGAAAAACAATGTGTTCGATTGGGAAGAAGTTTGTCTGACCAGCGCATATAAAGAACTTTTCAACAAATACGGCAT
CAACTATCAGCAGGGTGATATTCGTGCACTGCTGTGTGAACAGAGCGATAAAGCGTTTTATAGCAGTTTTATGGCAC
TGATGAGCCTGATGCTGCAGATGCGTAATAGCATTACCGGTCGCACCGATGTGGATTTTCTGATTAGTCCGGTGAAA
AATTCCGATGGCATCTTTTATGATAGCCGCAATTACGAAGCACAAGAAAATGCAATTCTGCCGAAAAACGCAGATGC
AAATGGTGCATATAACATTGCACGTAAAGTTCTGTGGGCAATTGGCCAGTTTAAGAAAGCAGAAGATGAGAAGCTGG
ACAAAGTGAAAATTGCGATCAGCAATAAAGAGTGGCTGGAATACGCACAGACCAGCGTTAAACATGGTAGCGCAGGT
AGTGCAGCAGGTAGCGGTGAATTTATGGTTAGCAAAGGTGAAGAACTGTTTACCGGCGTTGTGCCGATTCTGGTGGA
ACTGGATGGTGATGTGAATGGCCATAAATTTAGCGTTAGCGGCGAAGGCGAAGGTGATGCGACCTATGGTAAACTGA
CCCTGAAATTTATTTGCACCACCGGTAAACTGCCGGTTCCGTGGCCGACCCTGGTGACCACCCTGACCTATGGCGTT
CAGTGCTTTAGCCGCTATCCGGATCATATGAAACAGCATGATTTCTTTAAAAGCGCGATGCCGGAAGGCTATGTGCA
GGAACGTACCATTTTTTTCAAAGATGATGGCAACTATAAAACCCGTGCGGAAGTTAAATTTGAAGGCGATACCCTGG
TGAACCGCATTGAACTGAAAGGTATTGATTTTAAAGAAGATGGCAACATTCTGGGTCATAAACTGGAATATAATTAC
AACAGCCATAATGTGTATATTATGGCCGATAAACAGAAAAATGGCATCAAAGTGAACTTTAAAATCCGTCACAACAT
TGAAGATGGTAGCGTGCAGCTGGCGGATCATTATCAGCAGAATACCCCGATTGGTGATGGCCCGGTGCTGCTGCCGG
ATAATCATTATCTGAGCACCCAGAGCGCGCTGAGCAAAGATCCGAATGAAAAACGTGATCATATGGTGCTGCTGGAA
TTTGTTACCGCCGCGGGCATTACCCTGGGTATGGATGAACTGTATAAA
(LbCas12a (E795L)-(GGGGS)₄-(SEQ ID NO: 7)eGFP chimera DNA sequence)
SEQ ID NO: 390
ATGAGCAAACTGGAAAAGTTCACCAACTGTTATAGCCTGAGCAAAACCCTGCGTTTTAAAGCAATTCCGGTTGGTAA
AACCCAAGAGAACATTGATAATAAACGCCTGCTGGTCGAAGATGAAAAACGCGCTGAAGATTATAAAGGCGTGAAAA
AACTGCTGGATCGCTATTATCTGAGCTTCATTAACGATGTGCTGCACAGCATTAAACTGAAGAACCTGAACAACTAT
ATCAGCCTGTTTCGTAAAAAAACCCGCACCGAAAAAGAAAACAAAGAGCTGGAAAACCTGGAAATCAATCTGCGTAA
AGAAATCGCCAAAGCGTTTAAAGGTAACGAGGGTTATAAAAGCCTGTTCAAGAAAGACATCATCGAAACCATTCTGC
CGGAATTTCTGGATGATAAAGATGAAATTGCCCTGGTGAATAGCTTTAATGGCTTTACCACCGCATTTACCGGCTTT
TTTGATAATCGCGAAAACATGTTCAGCGAAGAAGCAAAAAGCACCAGCATTGCATTTCGCTGCATTAATGAAAATCT
GACCCGCTACATTAGCAACATGGATATCTTTGAAAAAGTGGACGCGATCTTCGATAAACACGAAGTGCAAGAGATCA
AAGAGAAAATCCTGAACAGCGATTATGACGTCGAAGATTTTTTTGAAGGCGAGTTCTTTAACTTCGTTCTGACCCAA
GAAGGTATCGACGTTTATAACGCAATTATTGGTGGTTTTGTTACCGAAAGCGGTGAGAAAATCAAAGGCCTGAATGA
ATATATCAACCTGTATAACCAGAAAACCAAACAGAAACTGCCGAAATTCAAACCGCTGTATAAACAGGTTCTGAGCG
ATCGTGAAAGCCTGAGCTTTTATGGTGAAGGTTATACCAGTGATGAAGAGGTTCTGGAAGTTTTTCGTAACACCCTG
AATAAAAACAGCGAGATCTTTAGCAGCATCAAAAAGCTTGAGAAACTGTTCAAAAACTTTGATGAGTATAGCAGCGC
AGGCATCTTTGTTAAAAATGGTCCGGCAATTAGCACCATCAGCAAAGATATTTTTGGCGAATGGAATGTGATCCGCG
ATAAATGGAATGCCGAATATGATGATATCCACCTGAAAAAAAAGGCCGTGGTGACCGAGAAATATGAAGATGATCGT
CGTAAAAGCTTCAAGAAAATTGGTAGCTTTAGCCTGGAACAGCTGCAAGAATATGCAGATGCAGATCTGAGCGTTGT
GGAAAAACTGAAAGAAATCATCATTCAGAAGGTGGACGAGATCTATAAAGTTTATGGTAGCAGCGAAAAACTGTTCG
ATGCAGATTTTGTTCTGGAAAAAAGCCTGAAAAAGAATGATGCCGTTGTGGCCATTATGAAAGATCTGCTGGATAGC
GTTAAGAGCTTCGAGAATTACATCAAAGCCTTTTTTGGTGAGGGCAAAGAAACCAATCGTGATGAAAGTTTCTATGG
CGATTTTGTGCTGGCCTATGATATTCTGCTGAAAGTGGACCATATTTATGATGCCATTCGCAATTATGTTACCCAGA
AACCGTATAGCAAAGACAAGTTCAAACTGTACTTTCAGAACCCGCAGTTTATGGGTGGTTGGGATAAAGATAAAGAA
ACCGATTATCGTGCCACCATCCTGCGTTATGGTAGTAAATACTATCTGGCCATCATGGACAAAAAATACGCAAAATG
CCTGCAGAAAATCGACAAAGATGATGTGAATGGCAACTATGAAAAAATCAACTACAAACTGCTGCCTGGTCCGAATA
AAATGCTGCCGAAAGTGTTCTTTAGCAAGAAATGGATGGCCTATTATAACCCGAGCGAGGATATTCAAAAGATCTAC
AAAAATGGCACCTTTAAAAAGGGCGACATGTTCAATCTGAACGATTGCCACAAACTGATCGATTTCTTCAAAGATTC
AATTTCGCGTTATCCGAAATGGTCCAATGCCTATGATTTTAACTTTAGCGAAACCGAAAAATACAAAGACATTGCCG
GTTTTTATCGCGAAGTGGAAGAACAGGGCTATAAAGTGAGCTTTGAAAGCGCAAGCAAAAAAGAGGTTGATAAGCTG
GTTGAAGAGGGCAAACTGTATATGTTCCAGATTTACAACAAAGATTTTAGCGACAAAAGCCATGGCACCCCGAATCT
GCATACCATGTACTTTAAACTGCTGTTCGACGAAAATAACCATGGTCAGATTCGTCTGAGCGGTGGTGCCGAACTGT
TTATGCGTCGTGCAAGTCTGAAAAAAGAAGAACTGGTTGTTCATCCGGCAAATAGCCCGATTGCAAACAAAAATCCG
GACAATCCGAAAAAAACCACGACACTGAGCTATGATGTGTATAAAGACAAACGTTTTAGCGAGGATCAGTATCTGCT
GCATATCCCGATTGCCATCAATAAATGCCCGAAAAACATCTTTAAGATCAACACCGAAGTTCGCGTGCTGCTGAAAC
ATGATGATAATCCGTATGTGATTGGCATTGATCGTGGTGAACGTAACCTGCTGTATATTGTTGTTGTTGATGGTAAA
GGCAACATCGTGGAACAGTATAGTCTGAACGAAATTATCAACAACTTTAACGGCATCCGCATCAAAACCGACTATCA
TAGCCTGCTGGACAAGAAAGAAAAAGAACGTTTTGAAGCACGTCAGAACTGGACCAGTATTGAAAACATCAAAGAAC
TGAAAGCCGGTTATATTAGCCAGGTGGTTCATAAAATCTGTGAGCTGGTAGAAAAATACGATGCAGTTATTGCACTG
GAAGATCTGAATAGCGGTTTCAAAAATAGCCGTGTGAAAGTCGAAAAACAGGTGTATCAGAAATTCGAGAAAATGCT
GATCGACAAACTGAACTACATGGTCGACAAAAAAAGCAATCCGTGTGCAACCGGTGGTGCACTGAAAGGTTATCAGA
TTACCAACAAATTTGAAAGCTTTAAAAGCATGAGCACCCAGAACGGCTTTATCTTCTATATTCCGGCATGGCTGACC
AGCAAAATTGATCCGAGCACCGGTTTTGTGAACCTGCTGAAAACAAAATATACCTCCATTGCCGACAGCAAGAAGTT
TATTAGCAGCTTTGATCGCATTATGTATGTTCCGGAAGAGGACCTGTTTGAATTCGCACTGGATTACAAAAATTTCA
GCCGTACCGATGCCGACTACATCAAAAAATGGAAACTGTACAGCTATGGTAACCGCATTCGCATTTTTCGCAACCCG
AAGAAAAACAATGTGTTCGATTGGGAAGAAGTTTGTCTGACCAGCGCATATAAAGAACTTTTCAACAAATACGGCAT
CAACTATCAGCAGGGTGATATTCGTGCACTGCTGTGTGAACAGAGCGATAAAGCGTTTTATAGCAGTTTTATGGCAC
TGATGAGCCTGATGCTGCAGATGCGTAATAGCATTACCGGTCGCACCGATGTGGATTTTCTGATTAGTCCGGTGAAA
AATTCCGATGGCATCTTTTATGATAGCCGCAATTACGAAGCACAAGAAAATGCAATTCTGCCGAAAAACGCAGATGC
AAATGGTGCATATAACATTGCACGTAAAGTTCTGTGGGCAATTGGCCAGTTTAAGAAAGCAGAAGATGAGAAGCTGG
ACAAAGTGAAAATTGCGATCAGCAATAAAGAGTGGCTGGAATACGCACAGACCAGCGTTAAACATGGAGGCGGAGGA
TCAGGCGGTGGCGGAAGTGGTGGAGGTGGGTCGGGAGGTGGTGGTAGCATGGTTAGCAAAGGTGAAGAACTGTTTAC
CGGCGTTGTGCCGATTCTGGTGGAACTGGATGGTGATGTGAATGGCCATAAATTTAGCGTTAGCGGCGAAGGCGAAG
GTGATGCGACCTATGGTAAACTGACCCTGAAATTTATTTGCACCACCGGTAAACTGCCGGTTCCGTGGCCGACCCTG
GTGACCACCCTGACCTATGGCGTTCAGTGCTTTAGCCGCTATCCGGATCATATGAAACAGCATGATTTCTTTAAAAG
CGCGATGCCGGAAGGCTATGTGCAGGAACGTACCATTTTTTTCAAAGATGATGGCAACTATAAAACCCGTGCGGAAG
TTAAATTTGAAGGCGATACCCTGGTGAACCGCATTGAACTGAAAGGTATTGATTTTAAAGAAGATGGCAACATTCTG
GGTCATAAACTGGAATATAATTACAACAGCCATAATGTGTATATTATGGCCGATAAACAGAAAAATGGCATCAAAGT
GAACTTTAAAATCCGTCACAACATTGAAGATGGTAGCGTGCAGCTGGCGGATCATTATCAGCAGAATACCCCGATTG
GTGATGGCCCGGTGCTGCTGCCGGATAATCATTATCTGAGCACCCAGAGCGCGCTGAGCAAAGATCCGAATGAAAAA
CGTGATCATATGGTGCTGCTGGAATTTGTTACCGCCGCGGGCATTACCCTGGGTATGGATGAACTGTATAAA
(LbCas12a (E795L)-GGGGSEAAAKGGGGS(SEQ ID NO: 37)-eGFP chimera DNA sequence)
SEQ ID NO: 391
ATGAGCAAACTGGAAAAGTTCACCAACTGTTATAGCCTGAGCAAAACCCTGCGTTTTAAAGCAATTCCGGTTGGTAA
AACCCAAGAGAACATTGATAATAAACGCCTGCTGGTCGAAGATGAAAAACGCGCTGAAGATTATAAAGGCGTGAAAA
AACTGCTGGATCGCTATTATCTGAGCTTCATTAACGATGTGCTGCACAGCATTAAACTGAAGAACCTGAACAACTAT
ATCAGCCTGTTTCGTAAAAAAACCCGCACCGAAAAAGAAAACAAAGAGCTGGAAAACCTGGAAATCAATCTGCGTAA
AGAAATCGCCAAAGCGTTTAAAGGTAACGAGGGTTATAAAAGCCTGTTCAAGAAAGACATCATCGAAACCATTCTGC
CGGAATTTCTGGATGATAAAGATGAAATTGCCCTGGTGAATAGCTTTAATGGCTTTACCACCGCATTTACCGGCTTT
TTTGATAATCGCGAAAACATGTTCAGCGAAGAAGCAAAAAGCACCAGCATTGCATTTCGCTGCATTAATGAAAATCT
GACCCGCTACATTAGCAACATGGATATCTTTGAAAAAGTGGACGCGATCTTCGATAAACACGAAGTGCAAGAGATCA
AAGAGAAAATCCTGAACAGCGATTATGACGTCGAAGATTTTTTTGAAGGCGAGTTCTTTAACTTCGTTCTGACCCAA
GAAGGTATCGACGTTTATAACGCAATTATTGGTGGTTTTGTTACCGAAAGCGGTGAGAAAATCAAAGGCCTGAATGA
ATATATCAACCTGTATAACCAGAAAACCAAACAGAAACTGCCGAAATTCAAACCGCTGTATAAACAGGTTCTGAGCG
ATCGTGAAAGCCTGAGCTTTTATGGTGAAGGTTATACCAGTGATGAAGAGGTTCTGGAAGTTTTTCGTAACACCCTG
AATAAAAACAGCGAGATCTTTAGCAGCATCAAAAAGCTTGAGAAACTGTTCAAAAACTTTGATGAGTATAGCAGCGC
AGGCATCTTTGTTAAAAATGGTCCGGCAATTAGCACCATCAGCAAAGATATTTTTGGCGAATGGAATGTGATCCGCG
ATAAATGGAATGCCGAATATGATGATATCCACCTGAAAAAAAAGGCCGTGGTGACCGAGAAATATGAAGATGATCGT
CGTAAAAGCTTCAAGAAAATTGGTAGCTTTAGCCTGGAACAGCTGCAAGAATATGCAGATGCAGATCTGAGCGTTGT
GGAAAAACTGAAAGAAATCATCATTCAGAAGGTGGACGAGATCTATAAAGTTTATGGTAGCAGCGAAAAACTGTTCG
ATGCAGATTTTGTTCTGGAAAAAAGCCTGAAAAAGAATGATGCCGTTGTGGCCATTATGAAAGATCTGCTGGATAGC
GTTAAGAGCTTCGAGAATTACATCAAAGCCTTTTTTGGTGAGGGCAAAGAAACCAATCGTGATGAAAGTTTCTATGG
CGATTTTGTGCTGGCCTATGATATTCTGCTGAAAGTGGACCATATTTATGATGCCATTCGCAATTATGTTACCCAGA
AACCGTATAGCAAAGACAAGTTCAAACTGTACTTTCAGAACCCGCAGTTTATGGGTGGTTGGGATAAAGATAAAGAA
ACCGATTATCGTGCCACCATCCTGCGTTATGGTAGTAAATACTATCTGGCCATCATGGACAAAAAATACGCAAAATG
CCTGCAGAAAATCGACAAAGATGATGTGAATGGCAACTATGAAAAAATCAACTACAAACTGCTGCCTGGTCCGAATA
AAATGCTGCCGAAAGTGTTCTTTAGCAAGAAATGGATGGCCTATTATAACCCGAGCGAGGATATTCAAAAGATCTAC
AAAAATGGCACCTTTAAAAAGGGCGACATGTTCAATCTGAACGATTGCCACAAACTGATCGATTTCTTCAAAGATTC
AATTTCGCGTTATCCGAAATGGTCCAATGCCTATGATTTTAACTTTAGCGAAACCGAAAAATACAAAGACATTGCCG
GTTTTTATCGCGAAGTGGAAGAACAGGGCTATAAAGTGAGCTTTGAAAGCGCAAGCAAAAAAGAGGTTGATAAGCTG
GTTGAAGAGGGCAAACTGTATATGTTCCAGATTTACAACAAAGATTTTAGCGACAAAAGCCATGGCACCCCGAATCT
GCATACCATGTACTTTAAACTGCTGTTCGACGAAAATAACCATGGTCAGATTCGTCTGAGCGGTGGTGCCGAACTGT
TTATGCGTCGTGCAAGTCTGAAAAAAGAAGAACTGGTTGTTCATCCGGCAAATAGCCCGATTGCAAACAAAAATCCG
GACAATCCGAAAAAAACCACGACACTGAGCTATGATGTGTATAAAGACAAACGTTTTAGCGAGGATCAGTATCTGCT
GCATATCCCGATTGCCATCAATAAATGCCCGAAAAACATCTTTAAGATCAACACCGAAGTTCGCGTGCTGCTGAAAC
ATGATGATAATCCGTATGTGATTGGCATTGATCGTGGTGAACGTAACCTGCTGTATATTGTTGTTGTTGATGGTAAA
GGCAACATCGTGGAACAGTATAGTCTGAACGAAATTATCAACAACTTTAACGGCATCCGCATCAAAACCGACTATCA
TAGCCTGCTGGACAAGAAAGAAAAAGAACGTTTTGAAGCACGTCAGAACTGGACCAGTATTGAAAACATCAAAGAAC
TGAAAGCCGGTTATATTAGCCAGGTGGTTCATAAAATCTGTGAGCTGGTAGAAAAATACGATGCAGTTATTGCACTG
GAAGATCTGAATAGCGGTTTCAAAAATAGCCGTGTGAAAGTCGAAAAACAGGTGTATCAGAAATTCGAGAAAATGCT
GATCGACAAACTGAACTACATGGTCGACAAAAAAAGCAATCCGTGTGCAACCGGTGGTGCACTGAAAGGTTATCAGA
TTACCAACAAATTTGAAAGCTTTAAAAGCATGAGCACCCAGAACGGCTTTATCTTCTATATTCCGGCATGGCTGACC
AGCAAAATTGATCCGAGCACCGGTTTTGTGAACCTGCTGAAAACAAAATATACCTCCATTGCCGACAGCAAGAAGTT
TATTAGCAGCTTTGATCGCATTATGTATGTTCCGGAAGAGGACCTGTTTGAATTCGCACTGGATTACAAAAATTTCA
GCCGTACCGATGCCGACTACATCAAAAAATGGAAACTGTACAGCTATGGTAACCGCATTCGCATTTTTCGCAACCCG
AAGAAAAACAATGTGTTCGATTGGGAAGAAGTTTGTCTGACCAGCGCATATAAAGAACTTTTCAACAAATACGGCAT
CAACTATCAGCAGGGTGATATTCGTGCACTGCTGTGTGAACAGAGCGATAAAGCGTTTTATAGCAGTTTTATGGCAC
TGATGAGCCTGATGCTGCAGATGCGTAATAGCATTACCGGTCGCACCGATGTGGATTTTCTGATTAGTCCGGTGAAA
AATTCCGATGGCATCTTTTATGATAGCCGCAATTACGAAGCACAAGAAAATGCAATTCTGCCGAAAAACGCAGATGC
AAATGGTGCATATAACATTGCACGTAAAGTTCTGTGGGCAATTGGCCAGTTTAAGAAAGCAGAAGATGAGAAGCTGG
ACAAAGTGAAAATTGCGATCAGCAATAAAGAGTGGCTGGAATACGCACAGACCAGCGTTAAACATGGAGGCGGAGGG
TCGGAAGCGGCAGCAAAAGGAGGCGGAGGAAGTATGGTTAGCAAAGGTGAAGAACTGTTTACCGGCGTTGTGCCGAT
TCTGGTGGAACTGGATGGTGATGTGAATGGCCATAAATTTAGCGTTAGCGGCGAAGGCGAAGGTGATGCGACCTATG
GTAAACTGACCCTGAAATTTATTTGCACCACCGGTAAACTGCCGGTTCCGTGGCCGACCCTGGTGACCACCCTGACC
TATGGCGTTCAGTGCTTTAGCCGCTATCCGGATCATATGAAACAGCATGATTTCTTTAAAAGCGCGATGCCGGAAGG
CTATGTGCAGGAACGTACCATTTTTTTCAAAGATGATGGCAACTATAAAACCCGTGCGGAAGTTAAATTTGAAGGCG
ATACCCTGGTGAACCGCATTGAACTGAAAGGTATTGATTTTAAAGAAGATGGCAACATTCTGGGTCATAAACTGGAA
TATAATTACAACAGCCATAATGTGTATATTATGGCCGATAAACAGAAAAATGGCATCAAAGTGAACTTTAAAATCCG
TCACAACATTGAAGATGGTAGCGTGCAGCTGGCGGATCATTATCAGCAGAATACCCCGATTGGTGATGGCCCGGTGC
TGCTGCCGGATAATCATTATCTGAGCACCCAGAGCGCGCTGAGCAAAGATCCGAATGAAAAACGTGATCATATGGTG
CTGCTGGAATTTGTTACCGCCGCGGGCATTACCCTGGGTATGGATGAACTGTATAAA
(LbCas12a (E795L)-A(EAAAK)₄A-(SEQ ID NO: 8)eGFP chimera DNA sequence)
SEQ ID NO: 392
ATGAGCAAACTGGAAAAGTTCACCAACTGTTATAGCCTGAGCAAAACCCTGCGTTTTAAAGCAATTCCGGTTGGTAA
AACCCAAGAGAACATTGATAATAAACGCCTGCTGGTCGAAGATGAAAAACGCGCTGAAGATTATAAAGGCGTGAAAA
AACTGCTGGATCGCTATTATCTGAGCTTCATTAACGATGTGCTGCACAGCATTAAACTGAAGAACCTGAACAACTAT
ATCAGCCTGTTTCGTAAAAAAACCCGCACCGAAAAAGAAAACAAAGAGCTGGAAAACCTGGAAATCAATCTGCGTAA
AGAAATCGCCAAAGCGTTTAAAGGTAACGAGGGTTATAAAAGCCTGTTCAAGAAAGACATCATCGAAACCATTCTGC
CGGAATTTCTGGATGATAAAGATGAAATTGCCCTGGTGAATAGCTTTAATGGCTTTACCACCGCATTTACCGGCTTT
TTTGATAATCGCGAAAACATGTTCAGCGAAGAAGCAAAAAGCACCAGCATTGCATTTCGCTGCATTAATGAAAATCT
GACCCGCTACATTAGCAACATGGATATCTTTGAAAAAGTGGACGCGATCTTCGATAAACACGAAGTGCAAGAGATCA
AAGAGAAAATCCTGAACAGCGATTATGACGTCGAAGATTTTTTTGAAGGCGAGTTCTTTAACTTCGTTCTGACCCAA
GAAGGTATCGACGTTTATAACGCAATTATTGGTGGTTTTGTTACCGAAAGCGGTGAGAAAATCAAAGGCCTGAATGA
ATATATCAACCTGTATAACCAGAAAACCAAACAGAAACTGCCGAAATTCAAACCGCTGTATAAACAGGTTCTGAGCG
ATCGTGAAAGCCTGAGCTTTTATGGTGAAGGTTATACCAGTGATGAAGAGGTTCTGGAAGTTTTTCGTAACACCCTG
AATAAAAACAGCGAGATCTTTAGCAGCATCAAAAAGCTTGAGAAACTGTTCAAAAACTTTGATGAGTATAGCAGCGC
AGGCATCTTTGTTAAAAATGGTCCGGCAATTAGCACCATCAGCAAAGATATTTTTGGCGAATGGAATGTGATCCGCG
ATAAATGGAATGCCGAATATGATGATATCCACCTGAAAAAAAAGGCCGTGGTGACCGAGAAATATGAAGATGATCGT
CGTAAAAGCTTCAAGAAAATTGGTAGCTTTAGCCTGGAACAGCTGCAAGAATATGCAGATGCAGATCTGAGCGTTGT
GGAAAAACTGAAAGAAATCATCATTCAGAAGGTGGACGAGATCTATAAAGTTTATGGTAGCAGCGAAAAACTGTTCG
ATGCAGATTTTGTTCTGGAAAAAAGCCTGAAAAAGAATGATGCCGTTGTGGCCATTATGAAAGATCTGCTGGATAGC
GTTAAGAGCTTCGAGAATTACATCAAAGCCTTTTTTGGTGAGGGCAAAGAAACCAATCGTGATGAAAGTTTCTATGG
CGATTTTGTGCTGGCCTATGATATTCTGCTGAAAGTGGACCATATTTATGATGCCATTCGCAATTATGTTACCCAGA
AACCGTATAGCAAAGACAAGTTCAAACTGTACTTTCAGAACCCGCAGTTTATGGGTGGTTGGGATAAAGATAAAGAA
ACCGATTATCGTGCCACCATCCTGCGTTATGGTAGTAAATACTATCTGGCCATCATGGACAAAAAATACGCAAAATG
CCTGCAGAAAATCGACAAAGATGATGTGAATGGCAACTATGAAAAAATCAACTACAAACTGCTGCCTGGTCCGAATA
AAATGCTGCCGAAAGTGTTCTTTAGCAAGAAATGGATGGCCTATTATAACCCGAGCGAGGATATTCAAAAGATCTAC
AAAAATGGCACCTTTAAAAAGGGCGACATGTTCAATCTGAACGATTGCCACAAACTGATCGATTTCTTCAAAGATTC
AATTTCGCGTTATCCGAAATGGTCCAATGCCTATGATTTTAACTTTAGCGAAACCGAAAAATACAAAGACATTGCCG
GTTTTTATCGCGAAGTGGAAGAACAGGGCTATAAAGTGAGCTTTGAAAGCGCAAGCAAAAAAGAGGTTGATAAGCTG
GTTGAAGAGGGCAAACTGTATATGTTCCAGATTTACAACAAAGATTTTAGCGACAAAAGCCATGGCACCCCGAATCT
GCATACCATGTACTTTAAACTGCTGTTCGACGAAAATAACCATGGTCAGATTCGTCTGAGCGGTGGTGCCGAACTGT
TTATGCGTCGTGCAAGTCTGAAAAAAGAAGAACTGGTTGTTCATCCGGCAAATAGCCCGATTGCAAACAAAAATCCG
GACAATCCGAAAAAAACCACGACACTGAGCTATGATGTGTATAAAGACAAACGTTTTAGCGAGGATCAGTATCTGCT
GCATATCCCGATTGCCATCAATAAATGCCCGAAAAACATCTTTAAGATCAACACCGAAGTTCGCGTGCTGCTGAAAC
ATGATGATAATCCGTATGTGATTGGCATTGATCGTGGTGAACGTAACCTGCTGTATATTGTTGTTGTTGATGGTAAA
GGCAACATCGTGGAACAGTATAGTCTGAACGAAATTATCAACAACTTTAACGGCATCCGCATCAAAACCGACTATCA
TAGCCTGCTGGACAAGAAAGAAAAAGAACGTTTTGAAGCACGTCAGAACTGGACCAGTATTGAAAACATCAAAGAAC
TGAAAGCCGGTTATATTAGCCAGGTGGTTCATAAAATCTGTGAGCTGGTAGAAAAATACGATGCAGTTATTGCACTG
GAAGATCTGAATAGCGGTTTCAAAAATAGCCGTGTGAAAGTCGAAAAACAGGTGTATCAGAAATTCGAGAAAATGCT
GATCGACAAACTGAACTACATGGTCGACAAAAAAAGCAATCCGTGTGCAACCGGTGGTGCACTGAAAGGTTATCAGA
TTACCAACAAATTTGAAAGCTTTAAAAGCATGAGCACCCAGAACGGCTTTATCTTCTATATTCCGGCATGGCTGACC
AGCAAAATTGATCCGAGCACCGGTTTTGTGAACCTGCTGAAAACAAAATATACCTCCATTGCCGACAGCAAGAAGTT
TATTAGCAGCTTTGATCGCATTATGTATGTTCCGGAAGAGGACCTGTTTGAATTCGCACTGGATTACAAAAATTTCA
GCCGTACCGATGCCGACTACATCAAAAAATGGAAACTGTACAGCTATGGTAACCGCATTCGCATTTTTCGCAACCCG
AAGAAAAACAATGTGTTCGATTGGGAAGAAGTTTGTCTGACCAGCGCATATAAAGAACTTTTCAACAAATACGGCAT
CAACTATCAGCAGGGTGATATTCGTGCACTGCTGTGTGAACAGAGCGATAAAGCGTTTTATAGCAGTTTTATGGCAC
TGATGAGCCTGATGCTGCAGATGCGTAATAGCATTACCGGTCGCACCGATGTGGATTTTCTGATTAGTCCGGTGAAA
AATTCCGATGGCATCTTTTATGATAGCCGCAATTACGAAGCACAAGAAAATGCAATTCTGCCGAAAAACGCAGATGC
AAATGGTGCATATAACATTGCACGTAAAGTTCTGTGGGCAATTGGCCAGTTTAAGAAAGCAGAAGATGAGAAGCTGG
ACAAAGTGAAAATTGCGATCAGCAATAAAGAGTGGCTGGAATACGCACAGACCAGCGTTAAACATGCTGAGGCCGCA
GCAAAAGAGGCTGCCGCTAAGGAGGCTGCTGCAAAAGAAGCAGCAGCGAAAGCTATGGTTAGCAAAGGTGAAGAACT
GTTTACCGGCGTTGTGCCGATTCTGGTGGAACTGGATGGTGATGTGAATGGCCATAAATTTAGCGTTAGCGGCGAAG
GCGAAGGTGATGCGACCTATGGTAAACTGACCCTGAAATTTATTTGCACCACCGGTAAACTGCCGGTTCCGTGGCCG
ACCCTGGTGACCACCCTGACCTATGGCGTTCAGTGCTTTAGCCGCTATCCGGATCATATGAAACAGCATGATTTCTT
TAAAAGCGCGATGCCGGAAGGCTATGTGCAGGAACGTACCATTTTTTTCAAAGATGATGGCAACTATAAAACCCGTG
CGGAAGTTAAATTTGAAGGCGATACCCTGGTGAACCGCATTGAACTGAAAGGTATTGATTTTAAAGAAGATGGCAAC
ATTCTGGGTCATAAACTGGAATATAATTACAACAGCCATAATGTGTATATTATGGCCGATAAACAGAAAAATGGCAT
CAAAGTGAACTTTAAAATCCGTCACAACATTGAAGATGGTAGCGTGCAGCTGGCGGATCATTATCAGCAGAATACCC
CGATTGGTGATGGCCCGGTGCTGCTGCCGGATAATCATTATCTGAGCACCCAGAGCGCGCTGAGCAAAGATCCGAAT
GAAAAACGTGATCATATGGTGCTGCTGGAATTTGTTACCGCCGCGGGCATTACCCTGGGTATGGATGAACTGTATAA
A
(LbCas12a (E795L)-A(EAAAK)₄ALEA(EAAAK)₄A(SEQ ID NO: 9)-
eGFP chimera DNA sequence)
SEQ ID NO: 393
ATGAGCAAACTGGAAAAGTTCACCAACTGTTATAGCCTGAGCAAAACCCTGCGTTTTAAAGCAATTCCGGTTGGTAA
AACCCAAGAGAACATTGATAATAAACGCCTGCTGGTCGAAGATGAAAAACGCGCTGAAGATTATAAAGGCGTGAAAA
AACTGCTGGATCGCTATTATCTGAGCTTCATTAACGATGTGCTGCACAGCATTAAACTGAAGAACCTGAACAACTAT
ATCAGCCTGTTTCGTAAAAAAACCCGCACCGAAAAAGAAAACAAAGAGCTGGAAAACCTGGAAATCAATCTGCGTAA
AGAAATCGCCAAAGCGTTTAAAGGTAACGAGGGTTATAAAAGCCTGTTCAAGAAAGACATCATCGAAACCATTCTGC
CGGAATTTCTGGATGATAAAGATGAAATTGCCCTGGTGAATAGCTTTAATGGCTTTACCACCGCATTTACCGGCTTT
TTTGATAATCGCGAAAACATGTTCAGCGAAGAAGCAAAAAGCACCAGCATTGCATTTCGCTGCATTAATGAAAATCT
GACCCGCTACATTAGCAACATGGATATCTTTGAAAAAGTGGACGCGATCTTCGATAAACACGAAGTGCAAGAGATCA
AAGAGAAAATCCTGAACAGCGATTATGACGTCGAAGATTTTTTTGAAGGCGAGTTCTTTAACTTCGTTCTGACCCAA
GAAGGTATCGACGTTTATAACGCAATTATTGGTGGTTTTGTTACCGAAAGCGGTGAGAAAATCAAAGGCCTGAATGA
ATATATCAACCTGTATAACCAGAAAACCAAACAGAAACTGCCGAAATTCAAACCGCTGTATAAACAGGTTCTGAGCG
ATCGTGAAAGCCTGAGCTTTTATGGTGAAGGTTATACCAGTGATGAAGAGGTTCTGGAAGTTTTTCGTAACACCCTG
AATAAAAACAGCGAGATCTTTAGCAGCATCAAAAAGCTTGAGAAACTGTTCAAAAACTTTGATGAGTATAGCAGCGC
AGGCATCTTTGTTAAAAATGGTCCGGCAATTAGCACCATCAGCAAAGATATTTTTGGCGAATGGAATGTGATCCGCG
ATAAATGGAATGCCGAATATGATGATATCCACCTGAAAAAAAAGGCCGTGGTGACCGAGAAATATGAAGATGATCGT
CGTAAAAGCTTCAAGAAAATTGGTAGCTTTAGCCTGGAACAGCTGCAAGAATATGCAGATGCAGATCTGAGCGTTGT
GGAAAAACTGAAAGAAATCATCATTCAGAAGGTGGACGAGATCTATAAAGTTTATGGTAGCAGCGAAAAACTGTTCG
ATGCAGATTTTGTTCTGGAAAAAAGCCTGAAAAAGAATGATGCCGTTGTGGCCATTATGAAAGATCTGCTGGATAGC
GTTAAGAGCTTCGAGAATTACATCAAAGCCTTTTTTGGTGAGGGCAAAGAAACCAATCGTGATGAAAGTTTCTATGG
CGATTTTGTGCTGGCCTATGATATTCTGCTGAAAGTGGACCATATTTATGATGCCATTCGCAATTATGTTACCCAGA
AACCGTATAGCAAAGACAAGTTCAAACTGTACTTTCAGAACCCGCAGTTTATGGGTGGTTGGGATAAAGATAAAGAA
ACCGATTATCGTGCCACCATCCTGCGTTATGGTAGTAAATACTATCTGGCCATCATGGACAAAAAATACGCAAAATG
CCTGCAGAAAATCGACAAAGATGATGTGAATGGCAACTATGAAAAAATCAACTACAAACTGCTGCCTGGTCCGAATA
AAATGCTGCCGAAAGTGTTCTTTAGCAAGAAATGGATGGCCTATTATAACCCGAGCGAGGATATTCAAAAGATCTAC
AAAAATGGCACCTTTAAAAAGGGCGACATGTTCAATCTGAACGATTGCCACAAACTGATCGATTTCTTCAAAGATTC
AATTTCGCGTTATCCGAAATGGTCCAATGCCTATGATTTTAACTTTAGCGAAACCGAAAAATACAAAGACATTGCCG
GTTTTTATCGCGAAGTGGAAGAACAGGGCTATAAAGTGAGCTTTGAAAGCGCAAGCAAAAAAGAGGTTGATAAGCTG
GTTGAAGAGGGCAAACTGTATATGTTCCAGATTTACAACAAAGATTTTAGCGACAAAAGCCATGGCACCCCGAATCT
GCATACCATGTACTTTAAACTGCTGTTCGACGAAAATAACCATGGTCAGATTCGTCTGAGCGGTGGTGCCGAACTGT
TTATGCGTCGTGCAAGTCTGAAAAAAGAAGAACTGGTTGTTCATCCGGCAAATAGCCCGATTGCAAACAAAAATCCG
GACAATCCGAAAAAAACCACGACACTGAGCTATGATGTGTATAAAGACAAACGTTTTAGCGAGGATCAGTATCTGCT
GCATATCCCGATTGCCATCAATAAATGCCCGAAAAACATCTTTAAGATCAACACCGAAGTTCGCGTGCTGCTGAAAC
ATGATGATAATCCGTATGTGATTGGCATTGATCGTGGTGAACGTAACCTGCTGTATATTGTTGTTGTTGATGGTAAA
GGCAACATCGTGGAACAGTATAGTCTGAACGAAATTATCAACAACTTTAACGGCATCCGCATCAAAACCGACTATCA
TAGCCTGCTGGACAAGAAAGAAAAAGAACGTTTTGAAGCACGTCAGAACTGGACCAGTATTGAAAACATCAAAGAAC
TGAAAGCCGGTTATATTAGCCAGGTGGTTCATAAAATCTGTGAGCTGGTAGAAAAATACGATGCAGTTATTGCACTG
GAAGATCTGAATAGCGGTTTCAAAAATAGCCGTGTGAAAGTCGAAAAACAGGTGTATCAGAAATTCGAGAAAATGCT
GATCGACAAACTGAACTACATGGTCGACAAAAAAAGCAATCCGTGTGCAACCGGTGGTGCACTGAAAGGTTATCAGA
TTACCAACAAATTTGAAAGCTTTAAAAGCATGAGCACCCAGAACGGCTTTATCTTCTATATTCCGGCATGGCTGACC
AGCAAAATTGATCCGAGCACCGGTTTTGTGAACCTGCTGAAAACAAAATATACCTCCATTGCCGACAGCAAGAAGTT
TATTAGCAGCTTTGATCGCATTATGTATGTTCCGGAAGAGGACCTGTTTGAATTCGCACTGGATTACAAAAATTTCA
GCCGTACCGATGCCGACTACATCAAAAAATGGAAACTGTACAGCTATGGTAACCGCATTCGCATTTTTCGCAACCCG
AAGAAAAACAATGTGTTCGATTGGGAAGAAGTTTGTCTGACCAGCGCATATAAAGAACTTTTCAACAAATACGGCAT
CAACTATCAGCAGGGTGATATTCGTGCACTGCTGTGTGAACAGAGCGATAAAGCGTTTTATAGCAGTTTTATGGCAC
TGATGAGCCTGATGCTGCAGATGCGTAATAGCATTACCGGTCGCACCGATGTGGATTTTCTGATTAGTCCGGTGAAA
AATTCCGATGGCATCTTTTATGATAGCCGCAATTACGAAGCACAAGAAAATGCAATTCTGCCGAAAAACGCAGATGC
AAATGGTGCATATAACATTGCACGTAAAGTTCTGTGGGCAATTGGCCAGTTTAAGAAAGCAGAAGATGAGAAGCTGG
ACAAAGTGAAAATTGCGATCAGCAATAAAGAGTGGCTGGAATACGCACAGACCAGCGTTAAACATGCCGAAGCAGCA
GCCAAAGAAGCTGCCGCAAAGGAGGCGGCAGCTAAAGAAGCGGCCGCTAAGGCATTGGAAGCGGAGGCGGCTGCCAA
GGAGGCTGCGGCGAAAGAAGCTGCGGCCAAAGAAGCGGCTGCAAAAGCGATGGTTAGCAAAGGTGAAGAACTGTTTA
CCGGCGTTGTGCCGATTCTGGTGGAACTGGATGGTGATGTGAATGGCCATAAATTTAGCGTTAGCGGCGAAGGCGAA
GGTGATGCGACCTATGGTAAACTGACCCTGAAATTTATTTGCACCACCGGTAAACTGCCGGTTCCGTGGCCGACCCT
GGTGACCACCCTGACCTATGGCGTTCAGTGCTTTAGCCGCTATCCGGATCATATGAAACAGCATGATTTCTTTAAAA
GCGCGATGCCGGAAGGCTATGTGCAGGAACGTACCATTTTTTTCAAAGATGATGGCAACTATAAAACCCGTGCGGAA
GTTAAATTTGAAGGCGATACCCTGGTGAACCGCATTGAACTGAAAGGTATTGATTTTAAAGAAGATGGCAACATTCT
GGGTCATAAACTGGAATATAATTACAACAGCCATAATGTGTATATTATGGCCGATAAACAGAAAAATGGCATCAAAG
TGAACTTTAAAATCCGTCACAACATTGAAGATGGTAGCGTGCAGCTGGCGGATCATTATCAGCAGAATACCCCGATT
GGTGATGGCCCGGTGCTGCTGCCGGATAATCATTATCTGAGCACCCAGAGCGCGCTGAGCAAAGATCCGAATGAAAA
ACGTGATCATATGGTGCTGCTGGAATTTGTTACCGCCGCGGGCATTACCCTGGGTATGGATGAACTGTATAAA
(LbCas12a (E795L)-LEA(EAAAK)₄ALEA(EAAAK)₄ALE(SEQ ID NO: 10)-
eGFP chimera DNA sequence)
SEQ ID NO: 394
ATGAGCAAACTGGAAAAGTTCACCAACTGTTATAGCCTGAGCAAAACCCTGCGTTTTAAAGCAATTCCGGTTGGTAA
AACCCAAGAGAACATTGATAATAAACGCCTGCTGGTCGAAGATGAAAAACGCGCTGAAGATTATAAAGGCGTGAAAA
AACTGCTGGATCGCTATTATCTGAGCTTCATTAACGATGTGCTGCACAGCATTAAACTGAAGAACCTGAACAACTAT
ATCAGCCTGTTTCGTAAAAAAACCCGCACCGAAAAAGAAAACAAAGAGCTGGAAAACCTGGAAATCAATCTGCGTAA
AGAAATCGCCAAAGCGTTTAAAGGTAACGAGGGTTATAAAAGCCTGTTCAAGAAAGACATCATCGAAACCATTCTGC
CGGAATTTCTGGATGATAAAGATGAAATTGCCCTGGTGAATAGCTTTAATGGCTTTACCACCGCATTTACCGGCTTT
TTTGATAATCGCGAAAACATGTTCAGCGAAGAAGCAAAAAGCACCAGCATTGCATTTCGCTGCATTAATGAAAATCT
GACCCGCTACATTAGCAACATGGATATCTTTGAAAAAGTGGACGCGATCTTCGATAAACACGAAGTGCAAGAGATCA
AAGAGAAAATCCTGAACAGCGATTATGACGTCGAAGATTTTTTTGAAGGCGAGTTCTTTAACTTCGTTCTGACCCAA
GAAGGTATCGACGTTTATAACGCAATTATTGGTGGTTTTGTTACCGAAAGCGGTGAGAAAATCAAAGGCCTGAATGA
ATATATCAACCTGTATAACCAGAAAACCAAACAGAAACTGCCGAAATTCAAACCGCTGTATAAACAGGTTCTGAGCG
ATCGTGAAAGCCTGAGCTTTTATGGTGAAGGTTATACCAGTGATGAAGAGGTTCTGGAAGTTTTTCGTAACACCCTG
AATAAAAACAGCGAGATCTTTAGCAGCATCAAAAAGCTTGAGAAACTGTTCAAAAACTTTGATGAGTATAGCAGCGC
AGGCATCTTTGTTAAAAATGGTCCGGCAATTAGCACCATCAGCAAAGATATTTTTGGCGAATGGAATGTGATCCGCG
ATAAATGGAATGCCGAATATGATGATATCCACCTGAAAAAAAAGGCCGTGGTGACCGAGAAATATGAAGATGATCGT
CGTAAAAGCTTCAAGAAAATTGGTAGCTTTAGCCTGGAACAGCTGCAAGAATATGCAGATGCAGATCTGAGCGTTGT
GGAAAAACTGAAAGAAATCATCATTCAGAAGGTGGACGAGATCTATAAAGTTTATGGTAGCAGCGAAAAACTGTTCG
ATGCAGATTTTGTTCTGGAAAAAAGCCTGAAAAAGAATGATGCCGTTGTGGCCATTATGAAAGATCTGCTGGATAGC
GTTAAGAGCTTCGAGAATTACATCAAAGCCTTTTTTGGTGAGGGCAAAGAAACCAATCGTGATGAAAGTTTCTATGG
CGATTTTGTGCTGGCCTATGATATTCTGCTGAAAGTGGACCATATTTATGATGCCATTCGCAATTATGTTACCCAGA
AACCGTATAGCAAAGACAAGTTCAAACTGTACTTTCAGAACCCGCAGTTTATGGGTGGTTGGGATAAAGATAAAGAA
ACCGATTATCGTGCCACCATCCTGCGTTATGGTAGTAAATACTATCTGGCCATCATGGACAAAAAATACGCAAAATG
CCTGCAGAAAATCGACAAAGATGATGTGAATGGCAACTATGAAAAAATCAACTACAAACTGCTGCCTGGTCCGAATA
AAATGCTGCCGAAAGTGTTCTTTAGCAAGAAATGGATGGCCTATTATAACCCGAGCGAGGATATTCAAAAGATCTAC
AAAAATGGCACCTTTAAAAAGGGCGACATGTTCAATCTGAACGATTGCCACAAACTGATCGATTTCTTCAAAGATTC
AATTTCGCGTTATCCGAAATGGTCCAATGCCTATGATTTTAACTTTAGCGAAACCGAAAAATACAAAGACATTGCCG
GTTTTTATCGCGAAGTGGAAGAACAGGGCTATAAAGTGAGCTTTGAAAGCGCAAGCAAAAAAGAGGTTGATAAGCTG
GTTGAAGAGGGCAAACTGTATATGTTCCAGATTTACAACAAAGATTTTAGCGACAAAAGCCATGGCACCCCGAATCT
GCATACCATGTACTTTAAACTGCTGTTCGACGAAAATAACCATGGTCAGATTCGTCTGAGCGGTGGTGCCGAACTGT
TTATGCGTCGTGCAAGTCTGAAAAAAGAAGAACTGGTTGTTCATCCGGCAAATAGCCCGATTGCAAACAAAAATCCG
GACAATCCGAAAAAAACCACGACACTGAGCTATGATGTGTATAAAGACAAACGTTTTAGCGAGGATCAGTATCTGCT
GCATATCCCGATTGCCATCAATAAATGCCCGAAAAACATCTTTAAGATCAACACCGAAGTTCGCGTGCTGCTGAAAC
ATGATGATAATCCGTATGTGATTGGCATTGATCGTGGTGAACGTAACCTGCTGTATATTGTTGTTGTTGATGGTAAA
GGCAACATCGTGGAACAGTATAGTCTGAACGAAATTATCAACAACTTTAACGGCATCCGCATCAAAACCGACTATCA
TAGCCTGCTGGACAAGAAAGAAAAAGAACGTTTTGAAGCACGTCAGAACTGGACCAGTATTGAAAACATCAAAGAAC
TGAAAGCCGGTTATATTAGCCAGGTGGTTCATAAAATCTGTGAGCTGGTAGAAAAATACGATGCAGTTATTGCACTG
GAAGATCTGAATAGCGGTTTCAAAAATAGCCGTGTGAAAGTCGAAAAACAGGTGTATCAGAAATTCGAGAAAATGCT
GATCGACAAACTGAACTACATGGTCGACAAAAAAAGCAATCCGTGTGCAACCGGTGGTGCACTGAAAGGTTATCAGA
TTACCAACAAATTTGAAAGCTTTAAAAGCATGAGCACCCAGAACGGCTTTATCTTCTATATTCCGGCATGGCTGACC
AGCAAAATTGATCCGAGCACCGGTTTTGTGAACCTGCTGAAAACAAAATATACCTCCATTGCCGACAGCAAGAAGTT
TATTAGCAGCTTTGATCGCATTATGTATGTTCCGGAAGAGGACCTGTTTGAATTCGCACTGGATTACAAAAATTTCA
GCCGTACCGATGCCGACTACATCAAAAAATGGAAACTGTACAGCTATGGTAACCGCATTCGCATTTTTCGCAACCCG
AAGAAAAACAATGTGTTCGATTGGGAAGAAGTTTGTCTGACCAGCGCATATAAAGAACTTTTCAACAAATACGGCAT
CAACTATCAGCAGGGTGATATTCGTGCACTGCTGTGTGAACAGAGCGATAAAGCGTTTTATAGCAGTTTTATGGCAC
TGATGAGCCTGATGCTGCAGATGCGTAATAGCATTACCGGTCGCACCGATGTGGATTTTCTGATTAGTCCGGTGAAA
AATTCCGATGGCATCTTTTATGATAGCCGCAATTACGAAGCACAAGAAAATGCAATTCTGCCGAAAAACGCAGATGC
AAATGGTGCATATAACATTGCACGTAAAGTTCTGTGGGCAATTGGCCAGTTTAAGAAAGCAGAAGATGAGAAGCTGG
ACAAAGTGAAAATTGCGATCAGCAATAAAGAGTGGCTGGAATACGCACAGACCAGCGTTAAACATTTAGAGGCTGAG
GCTGCTGCCAAGGAGGCTGCTGCGAAGGAAGCTGCAGCTAAAGAGGCAGCGGCCAAAGCACTTGAGGCCGAAGCCGC
CGCGAAAGAAGCCGCTGCTAAGGAGGCAGCCGCCAAAGAAGCGGCAGCTAAAGCATTAGAAATGGTTAGCAAAGGTG
AAGAACTGTTTACCGGCGTTGTGCCGATTCTGGTGGAACTGGATGGTGATGTGAATGGCCATAAATTTAGCGTTAGC
GGCGAAGGCGAAGGTGATGCGACCTATGGTAAACTGACCCTGAAATTTATTTGCACCACCGGTAAACTGCCGGTTCC
GTGGCCGACCCTGGTGACCACCCTGACCTATGGCGTTCAGTGCTTTAGCCGCTATCCGGATCATATGAAACAGCATG
ATTTCTTTAAAAGCGCGATGCCGGAAGGCTATGTGCAGGAACGTACCATTTTTTTCAAAGATGATGGCAACTATAAA
ACCCGTGCGGAAGTTAAATTTGAAGGCGATACCCTGGTGAACCGCATTGAACTGAAAGGTATTGATTTTAAAGAAGA
TGGCAACATTCTGGGTCATAAACTGGAATATAATTACAACAGCCATAATGTGTATATTATGGCCGATAAACAGAAAA
ATGGCATCAAAGTGAACTTTAAAATCCGTCACAACATTGAAGATGGTAGCGTGCAGCTGGCGGATCATTATCAGCAG
AATACCCCGATTGGTGATGGCCCGGTGCTGCTGCCGGATAATCATTATCTGAGCACCCAGAGCGCGCTGAGCAAAGA
TCCGAATGAAAAACGTGATCATATGGTGCTGCTGGAATTTGTTACCGCCGCGGGCATTACCCTGGGTATGGATGAAC
TGTATAAA
(LbCas12a (E795L)-APA-eGFP chimera DNA sequence)
SEQ ID NO: 395
ATGAGCAAACTGGAAAAGTTCACCAACTGTTATAGCCTGAGCAAAACCCTGCGTTTTAAAGCAATTCCGGTTGGTAA
AACCCAAGAGAACATTGATAATAAACGCCTGCTGGTCGAAGATGAAAAACGCGCTGAAGATTATAAAGGCGTGAAAA
AACTGCTGGATCGCTATTATCTGAGCTTCATTAACGATGTGCTGCACAGCATTAAACTGAAGAACCTGAACAACTAT
ATCAGCCTGTTTCGTAAAAAAACCCGCACCGAAAAAGAAAACAAAGAGCTGGAAAACCTGGAAATCAATCTGCGTAA
AGAAATCGCCAAAGCGTTTAAAGGTAACGAGGGTTATAAAAGCCTGTTCAAGAAAGACATCATCGAAACCATTCTGC
CGGAATTTCTGGATGATAAAGATGAAATTGCCCTGGTGAATAGCTTTAATGGCTTTACCACCGCATTTACCGGCTTT
TTTGATAATCGCGAAAACATGTTCAGCGAAGAAGCAAAAAGCACCAGCATTGCATTTCGCTGCATTAATGAAAATCT
GACCCGCTACATTAGCAACATGGATATCTTTGAAAAAGTGGACGCGATCTTCGATAAACACGAAGTGCAAGAGATCA
AAGAGAAAATCCTGAACAGCGATTATGACGTCGAAGATTTTTTTGAAGGCGAGTTCTTTAACTTCGTTCTGACCCAA
GAAGGTATCGACGTTTATAACGCAATTATTGGTGGTTTTGTTACCGAAAGCGGTGAGAAAATCAAAGGCCTGAATGA
ATATATCAACCTGTATAACCAGAAAACCAAACAGAAACTGCCGAAATTCAAACCGCTGTATAAACAGGTTCTGAGCG
ATCGTGAAAGCCTGAGCTTTTATGGTGAAGGTTATACCAGTGATGAAGAGGTTCTGGAAGTTTTTCGTAACACCCTG
AATAAAAACAGCGAGATCTTTAGCAGCATCAAAAAGCTTGAGAAACTGTTCAAAAACTTTGATGAGTATAGCAGCGC
AGGCATCTTTGTTAAAAATGGTCCGGCAATTAGCACCATCAGCAAAGATATTTTTGGCGAATGGAATGTGATCCGCG
ATAAATGGAATGCCGAATATGATGATATCCACCTGAAAAAAAAGGCCGTGGTGACCGAGAAATATGAAGATGATCGT
CGTAAAAGCTTCAAGAAAATTGGTAGCTTTAGCCTGGAACAGCTGCAAGAATATGCAGATGCAGATCTGAGCGTTGT
GGAAAAACTGAAAGAAATCATCATTCAGAAGGTGGACGAGATCTATAAAGTTTATGGTAGCAGCGAAAAACTGTTCG
ATGCAGATTTTGTTCTGGAAAAAAGCCTGAAAAAGAATGATGCCGTTGTGGCCATTATGAAAGATCTGCTGGATAGC
GTTAAGAGCTTCGAGAATTACATCAAAGCCTTTTTTGGTGAGGGCAAAGAAACCAATCGTGATGAAAGTTTCTATGG
CGATTTTGTGCTGGCCTATGATATTCTGCTGAAAGTGGACCATATTTATGATGCCATTCGCAATTATGTTACCCAGA
AACCGTATAGCAAAGACAAGTTCAAACTGTACTTTCAGAACCCGCAGTTTATGGGTGGTTGGGATAAAGATAAAGAA
ACCGATTATCGTGCCACCATCCTGCGTTATGGTAGTAAATACTATCTGGCCATCATGGACAAAAAATACGCAAAATG
CCTGCAGAAAATCGACAAAGATGATGTGAATGGCAACTATGAAAAAATCAACTACAAACTGCTGCCTGGTCCGAATA
AAATGCTGCCGAAAGTGTTCTTTAGCAAGAAATGGATGGCCTATTATAACCCGAGCGAGGATATTCAAAAGATCTAC
AAAAATGGCACCTTTAAAAAGGGCGACATGTTCAATCTGAACGATTGCCACAAACTGATCGATTTCTTCAAAGATTC
AATTTCGCGTTATCCGAAATGGTCCAATGCCTATGATTTTAACTTTAGCGAAACCGAAAAATACAAAGACATTGCCG
GTTTTTATCGCGAAGTGGAAGAACAGGGCTATAAAGTGAGCTTTGAAAGCGCAAGCAAAAAAGAGGTTGATAAGCTG
GTTGAAGAGGGCAAACTGTATATGTTCCAGATTTACAACAAAGATTTTAGCGACAAAAGCCATGGCACCCCGAATCT
GCATACCATGTACTTTAAACTGCTGTTCGACGAAAATAACCATGGTCAGATTCGTCTGAGCGGTGGTGCCGAACTGT
TTATGCGTCGTGCAAGTCTGAAAAAAGAAGAACTGGTTGTTCATCCGGCAAATAGCCCGATTGCAAACAAAAATCCG
GACAATCCGAAAAAAACCACGACACTGAGCTATGATGTGTATAAAGACAAACGTTTTAGCGAGGATCAGTATCTGCT
GCATATCCCGATTGCCATCAATAAATGCCCGAAAAACATCTTTAAGATCAACACCGAAGTTCGCGTGCTGCTGAAAC
ATGATGATAATCCGTATGTGATTGGCATTGATCGTGGTGAACGTAACCTGCTGTATATTGTTGTTGTTGATGGTAAA
GGCAACATCGTGGAACAGTATAGTCTGAACGAAATTATCAACAACTTTAACGGCATCCGCATCAAAACCGACTATCA
TAGCCTGCTGGACAAGAAAGAAAAAGAACGTTTTGAAGCACGTCAGAACTGGACCAGTATTGAAAACATCAAAGAAC
TGAAAGCCGGTTATATTAGCCAGGTGGTTCATAAAATCTGTGAGCTGGTAGAAAAATACGATGCAGTTATTGCACTG
GAAGATCTGAATAGCGGTTTCAAAAATAGCCGTGTGAAAGTCGAAAAACAGGTGTATCAGAAATTCGAGAAAATGCT
GATCGACAAACTGAACTACATGGTCGACAAAAAAAGCAATCCGTGTGCAACCGGTGGTGCACTGAAAGGTTATCAGA
TTACCAACAAATTTGAAAGCTTTAAAAGCATGAGCACCCAGAACGGCTTTATCTTCTATATTCCGGCATGGCTGACC
AGCAAAATTGATCCGAGCACCGGTTTTGTGAACCTGCTGAAAACAAAATATACCTCCATTGCCGACAGCAAGAAGTT
TATTAGCAGCTTTGATCGCATTATGTATGTTCCGGAAGAGGACCTGTTTGAATTCGCACTGGATTACAAAAATTTCA
GCCGTACCGATGCCGACTACATCAAAAAATGGAAACTGTACAGCTATGGTAACCGCATTCGCATTTTTCGCAACCCG
AAGAAAAACAATGTGTTCGATTGGGAAGAAGTTTGTCTGACCAGCGCATATAAAGAACTTTTCAACAAATACGGCAT
CAACTATCAGCAGGGTGATATTCGTGCACTGCTGTGTGAACAGAGCGATAAAGCGTTTTATAGCAGTTTTATGGCAC
TGATGAGCCTGATGCTGCAGATGCGTAATAGCATTACCGGTCGCACCGATGTGGATTTTCTGATTAGTCCGGTGAAA
AATTCCGATGGCATCTTTTATGATAGCCGCAATTACGAAGCACAAGAAAATGCAATTCTGCCGAAAAACGCAGATGC
AAATGGTGCATATAACATTGCACGTAAAGTTCTGTGGGCAATTGGCCAGTTTAAGAAAGCAGAAGATGAGAAGCTGG
ACAAAGTGAAAATTGCGATCAGCAATAAAGAGTGGCTGGAATACGCACAGACCAGCGTTAAACATGCACCTGCGATG
GTTAGCAAAGGTGAAGAACTGTTTACCGGCGTTGTGCCGATTCTGGTGGAACTGGATGGTGATGTGAATGGCCATAA
ATTTAGCGTTAGCGGCGAAGGCGAAGGTGATGCGACCTATGGTAAACTGACCCTGAAATTTATTTGCACCACCGGTA
AACTGCCGGTTCCGTGGCCGACCCTGGTGACCACCCTGACCTATGGCGTTCAGTGCTTTAGCCGCTATCCGGATCAT
ATGAAACAGCATGATTTCTTTAAAAGCGCGATGCCGGAAGGCTATGTGCAGGAACGTACCATTTTTTTCAAAGATGA
TGGCAACTATAAAACCCGTGCGGAAGTTAAATTTGAAGGCGATACCCTGGTGAACCGCATTGAACTGAAAGGTATTG
ATTTTAAAGAAGATGGCAACATTCTGGGTCATAAACTGGAATATAATTACAACAGCCATAATGTGTATATTATGGCC
GATAAACAGAAAAATGGCATCAAAGTGAACTTTAAAATCCGTCACAACATTGAAGATGGTAGCGTGCAGCTGGCGGA
TCATTATCAGCAGAATACCCCGATTGGTGATGGCCCGGTGCTGCTGCCGGATAATCATTATCTGAGCACCCAGAGCG
CGCTGAGCAAAGATCCGAATGAAAAACGTGATCATATGGTGCTGCTGGAATTTGTTACCGCCGCGGGCATTACCCTG
GGTATGGATGAACTGTATAAA
(LbCas12a (E795L)-APAPA(SEQ ID NO: 11)-eGFP chimera DNA sequence)
SEQ ID NO: 396
ATGAGCAAACTGGAAAAGTTCACCAACTGTTATAGCCTGAGCAAAACCCTGCGTTTTAAAGCAATTCCGGTTGGTAA
AACCCAAGAGAACATTGATAATAAACGCCTGCTGGTCGAAGATGAAAAACGCGCTGAAGATTATAAAGGCGTGAAAA
AACTGCTGGATCGCTATTATCTGAGCTTCATTAACGATGTGCTGCACAGCATTAAACTGAAGAACCTGAACAACTAT
ATCAGCCTGTTTCGTAAAAAAACCCGCACCGAAAAAGAAAACAAAGAGCTGGAAAACCTGGAAATCAATCTGCGTAA
AGAAATCGCCAAAGCGTTTAAAGGTAACGAGGGTTATAAAAGCCTGTTCAAGAAAGACATCATCGAAACCATTCTGC
CGGAATTTCTGGATGATAAAGATGAAATTGCCCTGGTGAATAGCTTTAATGGCTTTACCACCGCATTTACCGGCTTT
TTTGATAATCGCGAAAACATGTTCAGCGAAGAAGCAAAAAGCACCAGCATTGCATTTCGCTGCATTAATGAAAATCT
GACCCGCTACATTAGCAACATGGATATCTTTGAAAAAGTGGACGCGATCTTCGATAAACACGAAGTGCAAGAGATCA
AAGAGAAAATCCTGAACAGCGATTATGACGTCGAAGATTTTTTTGAAGGCGAGTTCTTTAACTTCGTTCTGACCCAA
GAAGGTATCGACGTTTATAACGCAATTATTGGTGGTTTTGTTACCGAAAGCGGTGAGAAAATCAAAGGCCTGAATGA
ATATATCAACCTGTATAACCAGAAAACCAAACAGAAACTGCCGAAATTCAAACCGCTGTATAAACAGGTTCTGAGCG
ATCGTGAAAGCCTGAGCTTTTATGGTGAAGGTTATACCAGTGATGAAGAGGTTCTGGAAGTTTTTCGTAACACCCTG
AATAAAAACAGCGAGATCTTTAGCAGCATCAAAAAGCTTGAGAAACTGTTCAAAAACTTTGATGAGTATAGCAGCGC
AGGCATCTTTGTTAAAAATGGTCCGGCAATTAGCACCATCAGCAAAGATATTTTTGGCGAATGGAATGTGATCCGCG
ATAAATGGAATGCCGAATATGATGATATCCACCTGAAAAAAAAGGCCGTGGTGACCGAGAAATATGAAGATGATCGT
CGTAAAAGCTTCAAGAAAATTGGTAGCTTTAGCCTGGAACAGCTGCAAGAATATGCAGATGCAGATCTGAGCGTTGT
GGAAAAACTGAAAGAAATCATCATTCAGAAGGTGGACGAGATCTATAAAGTTTATGGTAGCAGCGAAAAACTGTTCG
ATGCAGATTTTGTTCTGGAAAAAAGCCTGAAAAAGAATGATGCCGTTGTGGCCATTATGAAAGATCTGCTGGATAGC
GTTAAGAGCTTCGAGAATTACATCAAAGCCTTTTTTGGTGAGGGCAAAGAAACCAATCGTGATGAAAGTTTCTATGG
CGATTTTGTGCTGGCCTATGATATTCTGCTGAAAGTGGACCATATTTATGATGCCATTCGCAATTATGTTACCCAGA
AACCGTATAGCAAAGACAAGTTCAAACTGTACTTTCAGAACCCGCAGTTTATGGGTGGTTGGGATAAAGATAAAGAA
ACCGATTATCGTGCCACCATCCTGCGTTATGGTAGTAAATACTATCTGGCCATCATGGACAAAAAATACGCAAAATG
CCTGCAGAAAATCGACAAAGATGATGTGAATGGCAACTATGAAAAAATCAACTACAAACTGCTGCCTGGTCCGAATA
AAATGCTGCCGAAAGTGTTCTTTAGCAAGAAATGGATGGCCTATTATAACCCGAGCGAGGATATTCAAAAGATCTAC
AAAAATGGCACCTTTAAAAAGGGCGACATGTTCAATCTGAACGATTGCCACAAACTGATCGATTTCTTCAAAGATTC
AATTTCGCGTTATCCGAAATGGTCCAATGCCTATGATTTTAACTTTAGCGAAACCGAAAAATACAAAGACATTGCCG
GTTTTTATCGCGAAGTGGAAGAACAGGGCTATAAAGTGAGCTTTGAAAGCGCAAGCAAAAAAGAGGTTGATAAGCTG
GTTGAAGAGGGCAAACTGTATATGTTCCAGATTTACAACAAAGATTTTAGCGACAAAAGCCATGGCACCCCGAATCT
GCATACCATGTACTTTAAACTGCTGTTCGACGAAAATAACCATGGTCAGATTCGTCTGAGCGGTGGTGCCGAACTGT
TTATGCGTCGTGCAAGTCTGAAAAAAGAAGAACTGGTTGTTCATCCGGCAAATAGCCCGATTGCAAACAAAAATCCG
GACAATCCGAAAAAAACCACGACACTGAGCTATGATGTGTATAAAGACAAACGTTTTAGCGAGGATCAGTATCTGCT
GCATATCCCGATTGCCATCAATAAATGCCCGAAAAACATCTTTAAGATCAACACCGAAGTTCGCGTGCTGCTGAAAC
ATGATGATAATCCGTATGTGATTGGCATTGATCGTGGTGAACGTAACCTGCTGTATATTGTTGTTGTTGATGGTAAA
GGCAACATCGTGGAACAGTATAGTCTGAACGAAATTATCAACAACTTTAACGGCATCCGCATCAAAACCGACTATCA
TAGCCTGCTGGACAAGAAAGAAAAAGAACGTTTTGAAGCACGTCAGAACTGGACCAGTATTGAAAACATCAAAGAAC
TGAAAGCCGGTTATATTAGCCAGGTGGTTCATAAAATCTGTGAGCTGGTAGAAAAATACGATGCAGTTATTGCACTG
GAAGATCTGAATAGCGGTTTCAAAAATAGCCGTGTGAAAGTCGAAAAACAGGTGTATCAGAAATTCGAGAAAATGCT
GATCGACAAACTGAACTACATGGTCGACAAAAAAAGCAATCCGTGTGCAACCGGTGGTGCACTGAAAGGTTATCAGA
TTACCAACAAATTTGAAAGCTTTAAAAGCATGAGCACCCAGAACGGCTTTATCTTCTATATTCCGGCATGGCTGACC
AGCAAAATTGATCCGAGCACCGGTTTTGTGAACCTGCTGAAAACAAAATATACCTCCATTGCCGACAGCAAGAAGTT
TATTAGCAGCTTTGATCGCATTATGTATGTTCCGGAAGAGGACCTGTTTGAATTCGCACTGGATTACAAAAATTTCA
GCCGTACCGATGCCGACTACATCAAAAAATGGAAACTGTACAGCTATGGTAACCGCATTCGCATTTTTCGCAACCCG
AAGAAAAACAATGTGTTCGATTGGGAAGAAGTTTGTCTGACCAGCGCATATAAAGAACTTTTCAACAAATACGGCAT
CAACTATCAGCAGGGTGATATTCGTGCACTGCTGTGTGAACAGAGCGATAAAGCGTTTTATAGCAGTTTTATGGCAC
TGATGAGCCTGATGCTGCAGATGCGTAATAGCATTACCGGTCGCACCGATGTGGATTTTCTGATTAGTCCGGTGAAA
AATTCCGATGGCATCTTTTATGATAGCCGCAATTACGAAGCACAAGAAAATGCAATTCTGCCGAAAAACGCAGATGC
AAATGGTGCATATAACATTGCACGTAAAGTTCTGTGGGCAATTGGCCAGTTTAAGAAAGCAGAAGATGAGAAGCTGG
ACAAAGTGAAAATTGCGATCAGCAATAAAGAGTGGCTGGAATACGCACAGACCAGCGTTAAACATGCTCCTGCACCT
GCGATGGTTAGCAAAGGTGAAGAACTGTTTACCGGCGTTGTGCCGATTCTGGTGGAACTGGATGGTGATGTGAATGG
CCATAAATTTAGCGTTAGCGGCGAAGGCGAAGGTGATGCGACCTATGGTAAACTGACCCTGAAATTTATTTGCACCA
CCGGTAAACTGCCGGTTCCGTGGCCGACCCTGGTGACCACCCTGACCTATGGCGTTCAGTGCTTTAGCCGCTATCCG
GATCATATGAAACAGCATGATTTCTTTAAAAGCGCGATGCCGGAAGGCTATGTGCAGGAACGTACCATTTTTTTCAA
AGATGATGGCAACTATAAAACCCGTGCGGAAGTTAAATTTGAAGGCGATACCCTGGTGAACCGCATTGAACTGAAAG
GTATTGATTTTAAAGAAGATGGCAACATTCTGGGTCATAAACTGGAATATAATTACAACAGCCATAATGTGTATATT
ATGGCCGATAAACAGAAAAATGGCATCAAAGTGAACTTTAAAATCCGTCACAACATTGAAGATGGTAGCGTGCAGCT
GGCGGATCATTATCAGCAGAATACCCCGATTGGTGATGGCCCGGTGCTGCTGCCGGATAATCATTATCTGAGCACCC
AGAGCGCGCTGAGCAAAGATCCGAATGAAAAACGTGATCATATGGTGCTGCTGGAATTTGTTACCGCCGCGGGCATT
ACCCTGGGTATGGATGAACTGTATAAA
(LbCas12a (E795L)-APAPAPA(SEQ ID NO: 12)-eGFP chimera DNA sequence)
SEQ ID NO: 397
ATGAGCAAACTGGAAAAGTTCACCAACTGTTATAGCCTGAGCAAAACCCTGCGTTTTAAAGCAATTCCGGTTGGTAA
AACCCAAGAGAACATTGATAATAAACGCCTGCTGGTCGAAGATGAAAAACGCGCTGAAGATTATAAAGGCGTGAAAA
AACTGCTGGATCGCTATTATCTGAGCTTCATTAACGATGTGCTGCACAGCATTAAACTGAAGAACCTGAACAACTAT
ATCAGCCTGTTTCGTAAAAAAACCCGCACCGAAAAAGAAAACAAAGAGCTGGAAAACCTGGAAATCAATCTGCGTAA
AGAAATCGCCAAAGCGTTTAAAGGTAACGAGGGTTATAAAAGCCTGTTCAAGAAAGACATCATCGAAACCATTCTGC
CGGAATTTCTGGATGATAAAGATGAAATTGCCCTGGTGAATAGCTTTAATGGCTTTACCACCGCATTTACCGGCTTT
TTTGATAATCGCGAAAACATGTTCAGCGAAGAAGCAAAAAGCACCAGCATTGCATTTCGCTGCATTAATGAAAATCT
GACCCGCTACATTAGCAACATGGATATCTTTGAAAAAGTGGACGCGATCTTCGATAAACACGAAGTGCAAGAGATCA
AAGAGAAAATCCTGAACAGCGATTATGACGTCGAAGATTTTTTTGAAGGCGAGTTCTTTAACTTCGTTCTGACCCAA
GAAGGTATCGACGTTTATAACGCAATTATTGGTGGTTTTGTTACCGAAAGCGGTGAGAAAATCAAAGGCCTGAATGA
ATATATCAACCTGTATAACCAGAAAACCAAACAGAAACTGCCGAAATTCAAACCGCTGTATAAACAGGTTCTGAGCG
ATCGTGAAAGCCTGAGCTTTTATGGTGAAGGTTATACCAGTGATGAAGAGGTTCTGGAAGTTTTTCGTAACACCCTG
AATAAAAACAGCGAGATCTTTAGCAGCATCAAAAAGCTTGAGAAACTGTTCAAAAACTTTGATGAGTATAGCAGCGC
AGGCATCTTTGTTAAAAATGGTCCGGCAATTAGCACCATCAGCAAAGATATTTTTGGCGAATGGAATGTGATCCGCG
ATAAATGGAATGCCGAATATGATGATATCCACCTGAAAAAAAAGGCCGTGGTGACCGAGAAATATGAAGATGATCGT
CGTAAAAGCTTCAAGAAAATTGGTAGCTTTAGCCTGGAACAGCTGCAAGAATATGCAGATGCAGATCTGAGCGTTGT
GGAAAAACTGAAAGAAATCATCATTCAGAAGGTGGACGAGATCTATAAAGTTTATGGTAGCAGCGAAAAACTGTTCG
ATGCAGATTTTGTTCTGGAAAAAAGCCTGAAAAAGAATGATGCCGTTGTGGCCATTATGAAAGATCTGCTGGATAGC
GTTAAGAGCTTCGAGAATTACATCAAAGCCTTTTTTGGTGAGGGCAAAGAAACCAATCGTGATGAAAGTTTCTATGG
CGATTTTGTGCTGGCCTATGATATTCTGCTGAAAGTGGACCATATTTATGATGCCATTCGCAATTATGTTACCCAGA
AACCGTATAGCAAAGACAAGTTCAAACTGTACTTTCAGAACCCGCAGTTTATGGGTGGTTGGGATAAAGATAAAGAA
ACCGATTATCGTGCCACCATCCTGCGTTATGGTAGTAAATACTATCTGGCCATCATGGACAAAAAATACGCAAAATG
CCTGCAGAAAATCGACAAAGATGATGTGAATGGCAACTATGAAAAAATCAACTACAAACTGCTGCCTGGTCCGAATA
AAATGCTGCCGAAAGTGTTCTTTAGCAAGAAATGGATGGCCTATTATAACCCGAGCGAGGATATTCAAAAGATCTAC
AAAAATGGCACCTTTAAAAAGGGCGACATGTTCAATCTGAACGATTGCCACAAACTGATCGATTTCTTCAAAGATTC
AATTTCGCGTTATCCGAAATGGTCCAATGCCTATGATTTTAACTTTAGCGAAACCGAAAAATACAAAGACATTGCCG
GTTTTTATCGCGAAGTGGAAGAACAGGGCTATAAAGTGAGCTTTGAAAGCGCAAGCAAAAAAGAGGTTGATAAGCTG
GTTGAAGAGGGCAAACTGTATATGTTCCAGATTTACAACAAAGATTTTAGCGACAAAAGCCATGGCACCCCGAATCT
GCATACCATGTACTTTAAACTGCTGTTCGACGAAAATAACCATGGTCAGATTCGTCTGAGCGGTGGTGCCGAACTGT
TTATGCGTCGTGCAAGTCTGAAAAAAGAAGAACTGGTTGTTCATCCGGCAAATAGCCCGATTGCAAACAAAAATCCG
GACAATCCGAAAAAAACCACGACACTGAGCTATGATGTGTATAAAGACAAACGTTTTAGCGAGGATCAGTATCTGCT
GCATATCCCGATTGCCATCAATAAATGCCCGAAAAACATCTTTAAGATCAACACCGAAGTTCGCGTGCTGCTGAAAC
ATGATGATAATCCGTATGTGATTGGCATTGATCGTGGTGAACGTAACCTGCTGTATATTGTTGTTGTTGATGGTAAA
GGCAACATCGTGGAACAGTATAGTCTGAACGAAATTATCAACAACTTTAACGGCATCCGCATCAAAACCGACTATCA
TAGCCTGCTGGACAAGAAAGAAAAAGAACGTTTTGAAGCACGTCAGAACTGGACCAGTATTGAAAACATCAAAGAAC
TGAAAGCCGGTTATATTAGCCAGGTGGTTCATAAAATCTGTGAGCTGGTAGAAAAATACGATGCAGTTATTGCACTG
GAAGATCTGAATAGCGGTTTCAAAAATAGCCGTGTGAAAGTCGAAAAACAGGTGTATCAGAAATTCGAGAAAATGCT
GATCGACAAACTGAACTACATGGTCGACAAAAAAAGCAATCCGTGTGCAACCGGTGGTGCACTGAAAGGTTATCAGA
TTACCAACAAATTTGAAAGCTTTAAAAGCATGAGCACCCAGAACGGCTTTATCTTCTATATTCCGGCATGGCTGACC
AGCAAAATTGATCCGAGCACCGGTTTTGTGAACCTGCTGAAAACAAAATATACCTCCATTGCCGACAGCAAGAAGTT
TATTAGCAGCTTTGATCGCATTATGTATGTTCCGGAAGAGGACCTGTTTGAATTCGCACTGGATTACAAAAATTTCA
GCCGTACCGATGCCGACTACATCAAAAAATGGAAACTGTACAGCTATGGTAACCGCATTCGCATTTTTCGCAACCCG
AAGAAAAACAATGTGTTCGATTGGGAAGAAGTTTGTCTGACCAGCGCATATAAAGAACTTTTCAACAAATACGGCAT
CAACTATCAGCAGGGTGATATTCGTGCACTGCTGTGTGAACAGAGCGATAAAGCGTTTTATAGCAGTTTTATGGCAC
TGATGAGCCTGATGCTGCAGATGCGTAATAGCATTACCGGTCGCACCGATGTGGATTTTCTGATTAGTCCGGTGAAA
AATTCCGATGGCATCTTTTATGATAGCCGCAATTACGAAGCACAAGAAAATGCAATTCTGCCGAAAAACGCAGATGC
AAATGGTGCATATAACATTGCACGTAAAGTTCTGTGGGCAATTGGCCAGTTTAAGAAAGCAGAAGATGAGAAGCTGG
ACAAAGTGAAAATTGCGATCAGCAATAAAGAGTGGCTGGAATACGCACAGACCAGCGTTAAACATGCGCCAGCTCCT
GCACCTGCGATGGTTAGCAAAGGTGAAGAACTGTTTACCGGCGTTGTGCCGATTCTGGTGGAACTGGATGGTGATGT
GAATGGCCATAAATTTAGCGTTAGCGGCGAAGGCGAAGGTGATGCGACCTATGGTAAACTGACCCTGAAATTTATTT
GCACCACCGGTAAACTGCCGGTTCCGTGGCCGACCCTGGTGACCACCCTGACCTATGGCGTTCAGTGCTTTAGCCGC
TATCCGGATCATATGAAACAGCATGATTTCTTTAAAAGCGCGATGCCGGAAGGCTATGTGCAGGAACGTACCATTTT
TTTCAAAGATGATGGCAACTATAAAACCCGTGCGGAAGTTAAATTTGAAGGCGATACCCTGGTGAACCGCATTGAAC
TGAAAGGTATTGATTTTAAAGAAGATGGCAACATTCTGGGTCATAAACTGGAATATAATTACAACAGCCATAATGTG
TATATTATGGCCGATAAACAGAAAAATGGCATCAAAGTGAACTTTAAAATCCGTCACAACATTGAAGATGGTAGCGT
GCAGCTGGCGGATCATTATCAGCAGAATACCCCGATTGGTGATGGCCCGGTGCTGCTGCCGGATAATCATTATCTGA
GCACCCAGAGCGCGCTGAGCAAAGATCCGAATGAAAAACGTGATCATATGGTGCTGCTGGAATTTGTTACCGCCGCG
GGCATTACCCTGGGTATGGATGAACTGTATAAA
(LbCas12a(E795L)-APAPAPAPA(SEQ ID NO: 13)-eGFP chimera DNA sequence)
SEQ ID NO: 398
ATGAGCAAACTGGAAAAGTTCACCAACTGTTATAGCCTGAGCAAAACCCTGCGTTTTAAAGCAATTCCGGTTGGTAA
AACCCAAGAGAACATTGATAATAAACGCCTGCTGGTCGAAGATGAAAAACGCGCTGAAGATTATAAAGGCGTGAAAA
AACTGCTGGATCGCTATTATCTGAGCTTCATTAACGATGTGCTGCACAGCATTAAACTGAAGAACCTGAACAACTAT
ATCAGCCTGTTTCGTAAAAAAACCCGCACCGAAAAAGAAAACAAAGAGCTGGAAAACCTGGAAATCAATCTGCGTAA
AGAAATCGCCAAAGCGTTTAAAGGTAACGAGGGTTATAAAAGCCTGTTCAAGAAAGACATCATCGAAACCATTCTGC
CGGAATTTCTGGATGATAAAGATGAAATTGCCCTGGTGAATAGCTTTAATGGCTTTACCACCGCATTTACCGGCTTT
TTTGATAATCGCGAAAACATGTTCAGCGAAGAAGCAAAAAGCACCAGCATTGCATTTCGCTGCATTAATGAAAATCT
GACCCGCTACATTAGCAACATGGATATCTTTGAAAAAGTGGACGCGATCTTCGATAAACACGAAGTGCAAGAGATCA
AAGAGAAAATCCTGAACAGCGATTATGACGTCGAAGATTTTTTTGAAGGCGAGTTCTTTAACTTCGTTCTGACCCAA
GAAGGTATCGACGTTTATAACGCAATTATTGGTGGTTTTGTTACCGAAAGCGGTGAGAAAATCAAAGGCCTGAATGA
ATATATCAACCTGTATAACCAGAAAACCAAACAGAAACTGCCGAAATTCAAACCGCTGTATAAACAGGTTCTGAGCG
ATCGTGAAAGCCTGAGCTTTTATGGTGAAGGTTATACCAGTGATGAAGAGGTTCTGGAAGTTTTTCGTAACACCCTG
AATAAAAACAGCGAGATCTTTAGCAGCATCAAAAAGCTTGAGAAACTGTTCAAAAACTTTGATGAGTATAGCAGCGC
AGGCATCTTTGTTAAAAATGGTCCGGCAATTAGCACCATCAGCAAAGATATTTTTGGCGAATGGAATGTGATCCGCG
ATAAATGGAATGCCGAATATGATGATATCCACCTGAAAAAAAAGGCCGTGGTGACCGAGAAATATGAAGATGATCGT
CGTAAAAGCTTCAAGAAAATTGGTAGCTTTAGCCTGGAACAGCTGCAAGAATATGCAGATGCAGATCTGAGCGTTGT
GGAAAAACTGAAAGAAATCATCATTCAGAAGGTGGACGAGATCTATAAAGTTTATGGTAGCAGCGAAAAACTGTTCG
ATGCAGATTTTGTTCTGGAAAAAAGCCTGAAAAAGAATGATGCCGTTGTGGCCATTATGAAAGATCTGCTGGATAGC
GTTAAGAGCTTCGAGAATTACATCAAAGCCTTTTTTGGTGAGGGCAAAGAAACCAATCGTGATGAAAGTTTCTATGG
CGATTTTGTGCTGGCCTATGATATTCTGCTGAAAGTGGACCATATTTATGATGCCATTCGCAATTATGTTACCCAGA
AACCGTATAGCAAAGACAAGTTCAAACTGTACTTTCAGAACCCGCAGTTTATGGGTGGTTGGGATAAAGATAAAGAA
ACCGATTATCGTGCCACCATCCTGCGTTATGGTAGTAAATACTATCTGGCCATCATGGACAAAAAATACGCAAAATG
CCTGCAGAAAATCGACAAAGATGATGTGAATGGCAACTATGAAAAAATCAACTACAAACTGCTGCCTGGTCCGAATA
AAATGCTGCCGAAAGTGTTCTTTAGCAAGAAATGGATGGCCTATTATAACCCGAGCGAGGATATTCAAAAGATCTAC
AAAAATGGCACCTTTAAAAAGGGCGACATGTTCAATCTGAACGATTGCCACAAACTGATCGATTTCTTCAAAGATTC
AATTTCGCGTTATCCGAAATGGTCCAATGCCTATGATTTTAACTTTAGCGAAACCGAAAAATACAAAGACATTGCCG
GTTTTTATCGCGAAGTGGAAGAACAGGGCTATAAAGTGAGCTTTGAAAGCGCAAGCAAAAAAGAGGTTGATAAGCTG
GTTGAAGAGGGCAAACTGTATATGTTCCAGATTTACAACAAAGATTTTAGCGACAAAAGCCATGGCACCCCGAATCT
GCATACCATGTACTTTAAACTGCTGTTCGACGAAAATAACCATGGTCAGATTCGTCTGAGCGGTGGTGCCGAACTGT
TTATGCGTCGTGCAAGTCTGAAAAAAGAAGAACTGGTTGTTCATCCGGCAAATAGCCCGATTGCAAACAAAAATCCG
GACAATCCGAAAAAAACCACGACACTGAGCTATGATGTGTATAAAGACAAACGTTTTAGCGAGGATCAGTATCTGCT
GCATATCCCGATTGCCATCAATAAATGCCCGAAAAACATCTTTAAGATCAACACCGAAGTTCGCGTGCTGCTGAAAC
ATGATGATAATCCGTATGTGATTGGCATTGATCGTGGTGAACGTAACCTGCTGTATATTGTTGTTGTTGATGGTAAA
GGCAACATCGTGGAACAGTATAGTCTGAACGAAATTATCAACAACTTTAACGGCATCCGCATCAAAACCGACTATCA
TAGCCTGCTGGACAAGAAAGAAAAAGAACGTTTTGAAGCACGTCAGAACTGGACCAGTATTGAAAACATCAAAGAAC
TGAAAGCCGGTTATATTAGCCAGGTGGTTCATAAAATCTGTGAGCTGGTAGAAAAATACGATGCAGTTATTGCACTG
GAAGATCTGAATAGCGGTTTCAAAAATAGCCGTGTGAAAGTCGAAAAACAGGTGTATCAGAAATTCGAGAAAATGCT
GATCGACAAACTGAACTACATGGTCGACAAAAAAAGCAATCCGTGTGCAACCGGTGGTGCACTGAAAGGTTATCAGA
TTACCAACAAATTTGAAAGCTTTAAAAGCATGAGCACCCAGAACGGCTTTATCTTCTATATTCCGGCATGGCTGACC
AGCAAAATTGATCCGAGCACCGGTTTTGTGAACCTGCTGAAAACAAAATATACCTCCATTGCCGACAGCAAGAAGTT
TATTAGCAGCTTTGATCGCATTATGTATGTTCCGGAAGAGGACCTGTTTGAATTCGCACTGGATTACAAAAATTTCA
GCCGTACCGATGCCGACTACATCAAAAAATGGAAACTGTACAGCTATGGTAACCGCATTCGCATTTTTCGCAACCCG
AAGAAAAACAATGTGTTCGATTGGGAAGAAGTTTGTCTGACCAGCGCATATAAAGAACTTTTCAACAAATACGGCAT
CAACTATCAGCAGGGTGATATTCGTGCACTGCTGTGTGAACAGAGCGATAAAGCGTTTTATAGCAGTTTTATGGCAC
TGATGAGCCTGATGCTGCAGATGCGTAATAGCATTACCGGTCGCACCGATGTGGATTTTCTGATTAGTCCGGTGAAA
AATTCCGATGGCATCTTTTATGATAGCCGCAATTACGAAGCACAAGAAAATGCAATTCTGCCGAAAAACGCAGATGC
AAATGGTGCATATAACATTGCACGTAAAGTTCTGTGGGCAATTGGCCAGTTTAAGAAAGCAGAAGATGAGAAGCTGG
ACAAAGTGAAAATTGCGATCAGCAATAAAGAGTGGCTGGAATACGCACAGACCAGCGTTAAACATGCTCCTGCGCCA
GCTCCTGCACCTGCGATGGTTAGCAAAGGTGAAGAACTGTTTACCGGCGTTGTGCCGATTCTGGTGGAACTGGATGG
TGATGTGAATGGCCATAAATTTAGCGTTAGCGGCGAAGGCGAAGGTGATGCGACCTATGGTAAACTGACCCTGAAAT
TTATTTGCACCACCGGTAAACTGCCGGTTCCGTGGCCGACCCTGGTGACCACCCTGACCTATGGCGTTCAGTGCTTT
AGCCGCTATCCGGATCATATGAAACAGCATGATTTCTTTAAAAGCGCGATGCCGGAAGGCTATGTGCAGGAACGTAC
CATTTTTTTCAAAGATGATGGCAACTATAAAACCCGTGCGGAAGTTAAATTTGAAGGCGATACCCTGGTGAACCGCA
TTGAACTGAAAGGTATTGATTTTAAAGAAGATGGCAACATTCTGGGTCATAAACTGGAATATAATTACAACAGCCAT
AATGTGTATATTATGGCCGATAAACAGAAAAATGGCATCAAAGTGAACTTTAAAATCCGTCACAACATTGAAGATGG
TAGCGTGCAGCTGGCGGATCATTATCAGCAGAATACCCCGATTGGTGATGGCCCGGTGCTGCTGCCGGATAATCATT
ATCTGAGCACCCAGAGCGCGCTGAGCAAAGATCCGAATGAAAAACGTGATCATATGGTGCTGCTGGAATTTGTTACC
GCCGCGGGCATTACCCTGGGTATGGATGAACTGTATAAA
(LbCas12a (E795L)-APAPAPAPAPA(SEQ ID NO: 14)-eGFP chimera DNA sequence)
SEQ ID NO: 399
ATGAGCAAACTGGAAAAGTTCACCAACTGTTATAGCCTGAGCAAAACCCTGCGTTTTAAAGCAATTCCGGTTGGTAA
AACCCAAGAGAACATTGATAATAAACGCCTGCTGGTCGAAGATGAAAAACGCGCTGAAGATTATAAAGGCGTGAAAA
AACTGCTGGATCGCTATTATCTGAGCTTCATTAACGATGTGCTGCACAGCATTAAACTGAAGAACCTGAACAACTAT
ATCAGCCTGTTTCGTAAAAAAACCCGCACCGAAAAAGAAAACAAAGAGCTGGAAAACCTGGAAATCAATCTGCGTAA
AGAAATCGCCAAAGCGTTTAAAGGTAACGAGGGTTATAAAAGCCTGTTCAAGAAAGACATCATCGAAACCATTCTGC
CGGAATTTCTGGATGATAAAGATGAAATTGCCCTGGTGAATAGCTTTAATGGCTTTACCACCGCATTTACCGGCTTT
TTTGATAATCGCGAAAACATGTTCAGCGAAGAAGCAAAAAGCACCAGCATTGCATTTCGCTGCATTAATGAAAATCT
GACCCGCTACATTAGCAACATGGATATCTTTGAAAAAGTGGACGCGATCTTCGATAAACACGAAGTGCAAGAGATCA
AAGAGAAAATCCTGAACAGCGATTATGACGTCGAAGATTTTTTTGAAGGCGAGTTCTTTAACTTCGTTCTGACCCAA
GAAGGTATCGACGTTTATAACGCAATTATTGGTGGTTTTGTTACCGAAAGCGGTGAGAAAATCAAAGGCCTGAATGA
ATATATCAACCTGTATAACCAGAAAACCAAACAGAAACTGCCGAAATTCAAACCGCTGTATAAACAGGTTCTGAGCG
ATCGTGAAAGCCTGAGCTTTTATGGTGAAGGTTATACCAGTGATGAAGAGGTTCTGGAAGTTTTTCGTAACACCCTG
AATAAAAACAGCGAGATCTTTAGCAGCATCAAAAAGCTTGAGAAACTGTTCAAAAACTTTGATGAGTATAGCAGCGC
AGGCATCTTTGTTAAAAATGGTCCGGCAATTAGCACCATCAGCAAAGATATTTTTGGCGAATGGAATGTGATCCGCG
ATAAATGGAATGCCGAATATGATGATATCCACCTGAAAAAAAAGGCCGTGGTGACCGAGAAATATGAAGATGATCGT
CGTAAAAGCTTCAAGAAAATTGGTAGCTTTAGCCTGGAACAGCTGCAAGAATATGCAGATGCAGATCTGAGCGTTGT
GGAAAAACTGAAAGAAATCATCATTCAGAAGGTGGACGAGATCTATAAAGTTTATGGTAGCAGCGAAAAACTGTTCG
ATGCAGATTTTGTTCTGGAAAAAAGCCTGAAAAAGAATGATGCCGTTGTGGCCATTATGAAAGATCTGCTGGATAGC
GTTAAGAGCTTCGAGAATTACATCAAAGCCTTTTTTGGTGAGGGCAAAGAAACCAATCGTGATGAAAGTTTCTATGG
CGATTTTGTGCTGGCCTATGATATTCTGCTGAAAGTGGACCATATTTATGATGCCATTCGCAATTATGTTACCCAGA
AACCGTATAGCAAAGACAAGTTCAAACTGTACTTTCAGAACCCGCAGTTTATGGGTGGTTGGGATAAAGATAAAGAA
ACCGATTATCGTGCCACCATCCTGCGTTATGGTAGTAAATACTATCTGGCCATCATGGACAAAAAATACGCAAAATG
CCTGCAGAAAATCGACAAAGATGATGTGAATGGCAACTATGAAAAAATCAACTACAAACTGCTGCCTGGTCCGAATA
AAATGCTGCCGAAAGTGTTCTTTAGCAAGAAATGGATGGCCTATTATAACCCGAGCGAGGATATTCAAAAGATCTAC
AAAAATGGCACCTTTAAAAAGGGCGACATGTTCAATCTGAACGATTGCCACAAACTGATCGATTTCTTCAAAGATTC
AATTTCGCGTTATCCGAAATGGTCCAATGCCTATGATTTTAACTTTAGCGAAACCGAAAAATACAAAGACATTGCCG
GTTTTTATCGCGAAGTGGAAGAACAGGGCTATAAAGTGAGCTTTGAAAGCGCAAGCAAAAAAGAGGTTGATAAGCTG
GTTGAAGAGGGCAAACTGTATATGTTCCAGATTTACAACAAAGATTTTAGCGACAAAAGCCATGGCACCCCGAATCT
GCATACCATGTACTTTAAACTGCTGTTCGACGAAAATAACCATGGTCAGATTCGTCTGAGCGGTGGTGCCGAACTGT
TTATGCGTCGTGCAAGTCTGAAAAAAGAAGAACTGGTTGTTCATCCGGCAAATAGCCCGATTGCAAACAAAAATCCG
GACAATCCGAAAAAAACCACGACACTGAGCTATGATGTGTATAAAGACAAACGTTTTAGCGAGGATCAGTATCTGCT
GCATATCCCGATTGCCATCAATAAATGCCCGAAAAACATCTTTAAGATCAACACCGAAGTTCGCGTGCTGCTGAAAC
ATGATGATAATCCGTATGTGATTGGCATTGATCGTGGTGAACGTAACCTGCTGTATATTGTTGTTGTTGATGGTAAA
GGCAACATCGTGGAACAGTATAGTCTGAACGAAATTATCAACAACTTTAACGGCATCCGCATCAAAACCGACTATCA
TAGCCTGCTGGACAAGAAAGAAAAAGAACGTTTTGAAGCACGTCAGAACTGGACCAGTATTGAAAACATCAAAGAAC
TGAAAGCCGGTTATATTAGCCAGGTGGTTCATAAAATCTGTGAGCTGGTAGAAAAATACGATGCAGTTATTGCACTG
GAAGATCTGAATAGCGGTTTCAAAAATAGCCGTGTGAAAGTCGAAAAACAGGTGTATCAGAAATTCGAGAAAATGCT
GATCGACAAACTGAACTACATGGTCGACAAAAAAAGCAATCCGTGTGCAACCGGTGGTGCACTGAAAGGTTATCAGA
TTACCAACAAATTTGAAAGCTTTAAAAGCATGAGCACCCAGAACGGCTTTATCTTCTATATTCCGGCATGGCTGACC
AGCAAAATTGATCCGAGCACCGGTTTTGTGAACCTGCTGAAAACAAAATATACCTCCATTGCCGACAGCAAGAAGTT
TATTAGCAGCTTTGATCGCATTATGTATGTTCCGGAAGAGGACCTGTTTGAATTCGCACTGGATTACAAAAATTTCA
GCCGTACCGATGCCGACTACATCAAAAAATGGAAACTGTACAGCTATGGTAACCGCATTCGCATTTTTCGCAACCCG
AAGAAAAACAATGTGTTCGATTGGGAAGAAGTTTGTCTGACCAGCGCATATAAAGAACTTTTCAACAAATACGGCAT
CAACTATCAGCAGGGTGATATTCGTGCACTGCTGTGTGAACAGAGCGATAAAGCGTTTTATAGCAGTTTTATGGCAC
TGATGAGCCTGATGCTGCAGATGCGTAATAGCATTACCGGTCGCACCGATGTGGATTTTCTGATTAGTCCGGTGAAA
AATTCCGATGGCATCTTTTATGATAGCCGCAATTACGAAGCACAAGAAAATGCAATTCTGCCGAAAAACGCAGATGC
AAATGGTGCATATAACATTGCACGTAAAGTTCTGTGGGCAATTGGCCAGTTTAAGAAAGCAGAAGATGAGAAGCTGG
ACAAAGTGAAAATTGCGATCAGCAATAAAGAGTGGCTGGAATACGCACAGACCAGCGTTAAACATGCGCCCGCTCCT
GCGCCAGCTCCTGCACCTGCGATGGTTAGCAAAGGTGAAGAACTGTTTACCGGCGTTGTGCCGATTCTGGTGGAACT
GGATGGTGATGTGAATGGCCATAAATTTAGCGTTAGCGGCGAAGGCGAAGGTGATGCGACCTATGGTAAACTGACCC
TGAAATTTATTTGCACCACCGGTAAACTGCCGGTTCCGTGGCCGACCCTGGTGACCACCCTGACCTATGGCGTTCAG
TGCTTTAGCCGCTATCCGGATCATATGAAACAGCATGATTTCTTTAAAAGCGCGATGCCGGAAGGCTATGTGCAGGA
ACGTACCATTTTTTTCAAAGATGATGGCAACTATAAAACCCGTGCGGAAGTTAAATTTGAAGGCGATACCCTGGTGA
ACCGCATTGAACTGAAAGGTATTGATTTTAAAGAAGATGGCAACATTCTGGGTCATAAACTGGAATATAATTACAAC
AGCCATAATGTGTATATTATGGCCGATAAACAGAAAAATGGCATCAAAGTGAACTTTAAAATCCGTCACAACATTGA
AGATGGTAGCGTGCAGCTGGCGGATCATTATCAGCAGAATACCCCGATTGGTGATGGCCCGGTGCTGCTGCCGGATA
ATCATTATCTGAGCACCCAGAGCGCGCTGAGCAAAGATCCGAATGAAAAACGTGATCATATGGTGCTGCTGGAATTT
GTTACCGCCGCGGGCATTACCCTGGGTATGGATGAACTGTATAAA
(LbCas12a (E795L)-APAPAPAPAPAPA(SEQ ID NO: 15)-eGFP chimera DNA sequence)
SEQ ID NO: 400
ATGAGCAAACTGGAAAAGTTCACCAACTGTTATAGCCTGAGCAAAACCCTGCGTTTTAAAGCAATTCCGGTTGGTAA
AACCCAAGAGAACATTGATAATAAACGCCTGCTGGTCGAAGATGAAAAACGCGCTGAAGATTATAAAGGCGTGAAAA
AACTGCTGGATCGCTATTATCTGAGCTTCATTAACGATGTGCTGCACAGCATTAAACTGAAGAACCTGAACAACTAT
ATCAGCCTGTTTCGTAAAAAAACCCGCACCGAAAAAGAAAACAAAGAGCTGGAAAACCTGGAAATCAATCTGCGTAA
AGAAATCGCCAAAGCGTTTAAAGGTAACGAGGGTTATAAAAGCCTGTTCAAGAAAGACATCATCGAAACCATTCTGC
CGGAATTTCTGGATGATAAAGATGAAATTGCCCTGGTGAATAGCTTTAATGGCTTTACCACCGCATTTACCGGCTTT
TTTGATAATCGCGAAAACATGTTCAGCGAAGAAGCAAAAAGCACCAGCATTGCATTTCGCTGCATTAATGAAAATCT
GACCCGCTACATTAGCAACATGGATATCTTTGAAAAAGTGGACGCGATCTTCGATAAACACGAAGTGCAAGAGATCA
AAGAGAAAATCCTGAACAGCGATTATGACGTCGAAGATTTTTTTGAAGGCGAGTTCTTTAACTTCGTTCTGACCCAA
GAAGGTATCGACGTTTATAACGCAATTATTGGTGGTTTTGTTACCGAAAGCGGTGAGAAAATCAAAGGCCTGAATGA
ATATATCAACCTGTATAACCAGAAAACCAAACAGAAACTGCCGAAATTCAAACCGCTGTATAAACAGGTTCTGAGCG
ATCGTGAAAGCCTGAGCTTTTATGGTGAAGGTTATACCAGTGATGAAGAGGTTCTGGAAGTTTTTCGTAACACCCTG
AATAAAAACAGCGAGATCTTTAGCAGCATCAAAAAGCTTGAGAAACTGTTCAAAAACTTTGATGAGTATAGCAGCGC
AGGCATCTTTGTTAAAAATGGTCCGGCAATTAGCACCATCAGCAAAGATATTTTTGGCGAATGGAATGTGATCCGCG
ATAAATGGAATGCCGAATATGATGATATCCACCTGAAAAAAAAGGCCGTGGTGACCGAGAAATATGAAGATGATCGT
CGTAAAAGCTTCAAGAAAATTGGTAGCTTTAGCCTGGAACAGCTGCAAGAATATGCAGATGCAGATCTGAGCGTTGT
GGAAAAACTGAAAGAAATCATCATTCAGAAGGTGGACGAGATCTATAAAGTTTATGGTAGCAGCGAAAAACTGTTCG
ATGCAGATTTTGTTCTGGAAAAAAGCCTGAAAAAGAATGATGCCGTTGTGGCCATTATGAAAGATCTGCTGGATAGC
GTTAAGAGCTTCGAGAATTACATCAAAGCCTTTTTTGGTGAGGGCAAAGAAACCAATCGTGATGAAAGTTTCTATGG
CGATTTTGTGCTGGCCTATGATATTCTGCTGAAAGTGGACCATATTTATGATGCCATTCGCAATTATGTTACCCAGA
AACCGTATAGCAAAGACAAGTTCAAACTGTACTTTCAGAACCCGCAGTTTATGGGTGGTTGGGATAAAGATAAAGAA
ACCGATTATCGTGCCACCATCCTGCGTTATGGTAGTAAATACTATCTGGCCATCATGGACAAAAAATACGCAAAATG
CCTGCAGAAAATCGACAAAGATGATGTGAATGGCAACTATGAAAAAATCAACTACAAACTGCTGCCTGGTCCGAATA
AAATGCTGCCGAAAGTGTTCTTTAGCAAGAAATGGATGGCCTATTATAACCCGAGCGAGGATATTCAAAAGATCTAC
AAAAATGGCACCTTTAAAAAGGGCGACATGTTCAATCTGAACGATTGCCACAAACTGATCGATTTCTTCAAAGATTC
AATTTCGCGTTATCCGAAATGGTCCAATGCCTATGATTTTAACTTTAGCGAAACCGAAAAATACAAAGACATTGCCG
GTTTTTATCGCGAAGTGGAAGAACAGGGCTATAAAGTGAGCTTTGAAAGCGCAAGCAAAAAAGAGGTTGATAAGCTG
GTTGAAGAGGGCAAACTGTATATGTTCCAGATTTACAACAAAGATTTTAGCGACAAAAGCCATGGCACCCCGAATCT
GCATACCATGTACTTTAAACTGCTGTTCGACGAAAATAACCATGGTCAGATTCGTCTGAGCGGTGGTGCCGAACTGT
TTATGCGTCGTGCAAGTCTGAAAAAAGAAGAACTGGTTGTTCATCCGGCAAATAGCCCGATTGCAAACAAAAATCCG
GACAATCCGAAAAAAACCACGACACTGAGCTATGATGTGTATAAAGACAAACGTTTTAGCGAGGATCAGTATCTGCT
GCATATCCCGATTGCCATCAATAAATGCCCGAAAAACATCTTTAAGATCAACACCGAAGTTCGCGTGCTGCTGAAAC
ATGATGATAATCCGTATGTGATTGGCATTGATCGTGGTGAACGTAACCTGCTGTATATTGTTGTTGTTGATGGTAAA
GGCAACATCGTGGAACAGTATAGTCTGAACGAAATTATCAACAACTTTAACGGCATCCGCATCAAAACCGACTATCA
TAGCCTGCTGGACAAGAAAGAAAAAGAACGTTTTGAAGCACGTCAGAACTGGACCAGTATTGAAAACATCAAAGAAC
TGAAAGCCGGTTATATTAGCCAGGTGGTTCATAAAATCTGTGAGCTGGTAGAAAAATACGATGCAGTTATTGCACTG
GAAGATCTGAATAGCGGTTTCAAAAATAGCCGTGTGAAAGTCGAAAAACAGGTGTATCAGAAATTCGAGAAAATGCT
GATCGACAAACTGAACTACATGGTCGACAAAAAAAGCAATCCGTGTGCAACCGGTGGTGCACTGAAAGGTTATCAGA
TTACCAACAAATTTGAAAGCTTTAAAAGCATGAGCACCCAGAACGGCTTTATCTTCTATATTCCGGCATGGCTGACC
AGCAAAATTGATCCGAGCACCGGTTTTGTGAACCTGCTGAAAACAAAATATACCTCCATTGCCGACAGCAAGAAGTT
TATTAGCAGCTTTGATCGCATTATGTATGTTCCGGAAGAGGACCTGTTTGAATTCGCACTGGATTACAAAAATTTCA
GCCGTACCGATGCCGACTACATCAAAAAATGGAAACTGTACAGCTATGGTAACCGCATTCGCATTTTTCGCAACCCG
AAGAAAAACAATGTGTTCGATTGGGAAGAAGTTTGTCTGACCAGCGCATATAAAGAACTTTTCAACAAATACGGCAT
CAACTATCAGCAGGGTGATATTCGTGCACTGCTGTGTGAACAGAGCGATAAAGCGTTTTATAGCAGTTTTATGGCAC
TGATGAGCCTGATGCTGCAGATGCGTAATAGCATTACCGGTCGCACCGATGTGGATTTTCTGATTAGTCCGGTGAAA
AATTCCGATGGCATCTTTTATGATAGCCGCAATTACGAAGCACAAGAAAATGCAATTCTGCCGAAAAACGCAGATGC
AAATGGTGCATATAACATTGCACGTAAAGTTCTGTGGGCAATTGGCCAGTTTAAGAAAGCAGAAGATGAGAAGCTGG
ACAAAGTGAAAATTGCGATCAGCAATAAAGAGTGGCTGGAATACGCACAGACCAGCGTTAAACATGCGCCAGCGCCT
GCTCCTGCACCCGCTCCAGCACCTGCGATGGTTAGCAAAGGTGAAGAACTGTTTACCGGCGTTGTGCCGATTCTGGT
GGAACTGGATGGTGATGTGAATGGCCATAAATTTAGCGTTAGCGGCGAAGGCGAAGGTGATGCGACCTATGGTAAAC
TGACCCTGAAATTTATTTGCACCACCGGTAAACTGCCGGTTCCGTGGCCGACCCTGGTGACCACCCTGACCTATGGC
GTTCAGTGCTTTAGCCGCTATCCGGATCATATGAAACAGCATGATTTCTTTAAAAGCGCGATGCCGGAAGGCTATGT
GCAGGAACGTACCATTTTTTTCAAAGATGATGGCAACTATAAAACCCGTGCGGAAGTTAAATTTGAAGGCGATACCC
TGGTGAACCGCATTGAACTGAAAGGTATTGATTTTAAAGAAGATGGCAACATTCTGGGTCATAAACTGGAATATAAT
TACAACAGCCATAATGTGTATATTATGGCCGATAAACAGAAAAATGGCATCAAAGTGAACTTTAAAATCCGTCACAA
CATTGAAGATGGTAGCGTGCAGCTGGCGGATCATTATCAGCAGAATACCCCGATTGGTGATGGCCCGGTGCTGCTGC
CGGATAATCATTATCTGAGCACCCAGAGCGCGCTGAGCAAAGATCCGAATGAAAAACGTGATCATATGGTGCTGCTG
GAATTTGTTACCGCCGCGGGCATTACCCTGGGTATGGATGAACTGTATAAA
(LbCas12a (E795L)-APAPAPAPAPAPAPA(SEQ ID NO: 16)-eGFP chimera DNA sequence)
SEQ ID NO: 401
ATGAGCAAACTGGAAAAGTTCACCAACTGTTATAGCCTGAGCAAAACCCTGCGTTTTAAAGCAATTCCGGTTGGTAA
AACCCAAGAGAACATTGATAATAAACGCCTGCTGGTCGAAGATGAAAAACGCGCTGAAGATTATAAAGGCGTGAAAA
AACTGCTGGATCGCTATTATCTGAGCTTCATTAACGATGTGCTGCACAGCATTAAACTGAAGAACCTGAACAACTAT
ATCAGCCTGTTTCGTAAAAAAACCCGCACCGAAAAAGAAAACAAAGAGCTGGAAAACCTGGAAATCAATCTGCGTAA
AGAAATCGCCAAAGCGTTTAAAGGTAACGAGGGTTATAAAAGCCTGTTCAAGAAAGACATCATCGAAACCATTCTGC
CGGAATTTCTGGATGATAAAGATGAAATTGCCCTGGTGAATAGCTTTAATGGCTTTACCACCGCATTTACCGGCTTT
TTTGATAATCGCGAAAACATGTTCAGCGAAGAAGCAAAAAGCACCAGCATTGCATTTCGCTGCATTAATGAAAATCT
GACCCGCTACATTAGCAACATGGATATCTTTGAAAAAGTGGACGCGATCTTCGATAAACACGAAGTGCAAGAGATCA
AAGAGAAAATCCTGAACAGCGATTATGACGTCGAAGATTTTTTTGAAGGCGAGTTCTTTAACTTCGTTCTGACCCAA
GAAGGTATCGACGTTTATAACGCAATTATTGGTGGTTTTGTTACCGAAAGCGGTGAGAAAATCAAAGGCCTGAATGA
ATATATCAACCTGTATAACCAGAAAACCAAACAGAAACTGCCGAAATTCAAACCGCTGTATAAACAGGTTCTGAGCG
ATCGTGAAAGCCTGAGCTTTTATGGTGAAGGTTATACCAGTGATGAAGAGGTTCTGGAAGTTTTTCGTAACACCCTG
AATAAAAACAGCGAGATCTTTAGCAGCATCAAAAAGCTTGAGAAACTGTTCAAAAACTTTGATGAGTATAGCAGCGC
AGGCATCTTTGTTAAAAATGGTCCGGCAATTAGCACCATCAGCAAAGATATTTTTGGCGAATGGAATGTGATCCGCG
ATAAATGGAATGCCGAATATGATGATATCCACCTGAAAAAAAAGGCCGTGGTGACCGAGAAATATGAAGATGATCGT
CGTAAAAGCTTCAAGAAAATTGGTAGCTTTAGCCTGGAACAGCTGCAAGAATATGCAGATGCAGATCTGAGCGTTGT
GGAAAAACTGAAAGAAATCATCATTCAGAAGGTGGACGAGATCTATAAAGTTTATGGTAGCAGCGAAAAACTGTTCG
ATGCAGATTTTGTTCTGGAAAAAAGCCTGAAAAAGAATGATGCCGTTGTGGCCATTATGAAAGATCTGCTGGATAGC
GTTAAGAGCTTCGAGAATTACATCAAAGCCTTTTTTGGTGAGGGCAAAGAAACCAATCGTGATGAAAGTTTCTATGG
CGATTTTGTGCTGGCCTATGATATTCTGCTGAAAGTGGACCATATTTATGATGCCATTCGCAATTATGTTACCCAGA
AACCGTATAGCAAAGACAAGTTCAAACTGTACTTTCAGAACCCGCAGTTTATGGGTGGTTGGGATAAAGATAAAGAA
ACCGATTATCGTGCCACCATCCTGCGTTATGGTAGTAAATACTATCTGGCCATCATGGACAAAAAATACGCAAAATG
CCTGCAGAAAATCGACAAAGATGATGTGAATGGCAACTATGAAAAAATCAACTACAAACTGCTGCCTGGTCCGAATA
AAATGCTGCCGAAAGTGTTCTTTAGCAAGAAATGGATGGCCTATTATAACCCGAGCGAGGATATTCAAAAGATCTAC
AAAAATGGCACCTTTAAAAAGGGCGACATGTTCAATCTGAACGATTGCCACAAACTGATCGATTTCTTCAAAGATTC
AATTTCGCGTTATCCGAAATGGTCCAATGCCTATGATTTTAACTTTAGCGAAACCGAAAAATACAAAGACATTGCCG
GTTTTTATCGCGAAGTGGAAGAACAGGGCTATAAAGTGAGCTTTGAAAGCGCAAGCAAAAAAGAGGTTGATAAGCTG
GTTGAAGAGGGCAAACTGTATATGTTCCAGATTTACAACAAAGATTTTAGCGACAAAAGCCATGGCACCCCGAATCT
GCATACCATGTACTTTAAACTGCTGTTCGACGAAAATAACCATGGTCAGATTCGTCTGAGCGGTGGTGCCGAACTGT
TTATGCGTCGTGCAAGTCTGAAAAAAGAAGAACTGGTTGTTCATCCGGCAAATAGCCCGATTGCAAACAAAAATCCG
GACAATCCGAAAAAAACCACGACACTGAGCTATGATGTGTATAAAGACAAACGTTTTAGCGAGGATCAGTATCTGCT
GCATATCCCGATTGCCATCAATAAATGCCCGAAAAACATCTTTAAGATCAACACCGAAGTTCGCGTGCTGCTGAAAC
ATGATGATAATCCGTATGTGATTGGCATTGATCGTGGTGAACGTAACCTGCTGTATATTGTTGTTGTTGATGGTAAA
GGCAACATCGTGGAACAGTATAGTCTGAACGAAATTATCAACAACTTTAACGGCATCCGCATCAAAACCGACTATCA
TAGCCTGCTGGACAAGAAAGAAAAAGAACGTTTTGAAGCACGTCAGAACTGGACCAGTATTGAAAACATCAAAGAAC
TGAAAGCCGGTTATATTAGCCAGGTGGTTCATAAAATCTGTGAGCTGGTAGAAAAATACGATGCAGTTATTGCACTG
GAAGATCTGAATAGCGGTTTCAAAAATAGCCGTGTGAAAGTCGAAAAACAGGTGTATCAGAAATTCGAGAAAATGCT
GATCGACAAACTGAACTACATGGTCGACAAAAAAAGCAATCCGTGTGCAACCGGTGGTGCACTGAAAGGTTATCAGA
TTACCAACAAATTTGAAAGCTTTAAAAGCATGAGCACCCAGAACGGCTTTATCTTCTATATTCCGGCATGGCTGACC
AGCAAAATTGATCCGAGCACCGGTTTTGTGAACCTGCTGAAAACAAAATATACCTCCATTGCCGACAGCAAGAAGTT
TATTAGCAGCTTTGATCGCATTATGTATGTTCCGGAAGAGGACCTGTTTGAATTCGCACTGGATTACAAAAATTTCA
GCCGTACCGATGCCGACTACATCAAAAAATGGAAACTGTACAGCTATGGTAACCGCATTCGCATTTTTCGCAACCCG
AAGAAAAACAATGTGTTCGATTGGGAAGAAGTTTGTCTGACCAGCGCATATAAAGAACTTTTCAACAAATACGGCAT
CAACTATCAGCAGGGTGATATTCGTGCACTGCTGTGTGAACAGAGCGATAAAGCGTTTTATAGCAGTTTTATGGCAC
TGATGAGCCTGATGCTGCAGATGCGTAATAGCATTACCGGTCGCACCGATGTGGATTTTCTGATTAGTCCGGTGAAA
AATTCCGATGGCATCTTTTATGATAGCCGCAATTACGAAGCACAAGAAAATGCAATTCTGCCGAAAAACGCAGATGC
AAATGGTGCATATAACATTGCACGTAAAGTTCTGTGGGCAATTGGCCAGTTTAAGAAAGCAGAAGATGAGAAGCTGG
ACAAAGTGAAAATTGCGATCAGCAATAAAGAGTGGCTGGAATACGCACAGACCAGCGTTAAACATGCGCCAGCGCCT
GCTCCTGCACCCGCTCCAGCTCCTGCCCCAGCGATGGTTAGCAAAGGTGAAGAACTGTTTACCGGCGTTGTGCCGAT
TCTGGTGGAACTGGATGGTGATGTGAATGGCCATAAATTTAGCGTTAGCGGCGAAGGCGAAGGTGATGCGACCTATG
GTAAACTGACCCTGAAATTTATTTGCACCACCGGTAAACTGCCGGTTCCGTGGCCGACCCTGGTGACCACCCTGACC
TATGGCGTTCAGTGCTTTAGCCGCTATCCGGATCATATGAAACAGCATGATTTCTTTAAAAGCGCGATGCCGGAAGG
CTATGTGCAGGAACGTACCATTTTTTTCAAAGATGATGGCAACTATAAAACCCGTGCGGAAGTTAAATTTGAAGGCG
ATACCCTGGTGAACCGCATTGAACTGAAAGGTATTGATTTTAAAGAAGATGGCAACATTCTGGGTCATAAACTGGAA
TATAATTACAACAGCCATAATGTGTATATTATGGCCGATAAACAGAAAAATGGCATCAAAGTGAACTTTAAAATCCG
TCACAACATTGAAGATGGTAGCGTGCAGCTGGCGGATCATTATCAGCAGAATACCCCGATTGGTGATGGCCCGGTGC
TGCTGCCGGATAATCATTATCTGAGCACCCAGAGCGCGCTGAGCAAAGATCCGAATGAAAAACGTGATCATATGGTG
CTGCTGGAATTTGTTACCGCCGCGGGCATTACCCTGGGTATGGATGAACTGTATAAA
(LbCas12a (E795L)-APAPAPAPAPAPAPAPA(SEQ ID NO: 17)-eGFP chimera DNA sequence)
SEQ ID NO: 402
ATGAGCAAACTGGAAAAGTTCACCAACTGTTATAGCCTGAGCAAAACCCTGCGTTTTAAAGCAATTCCGGTTGGTAA
AACCCAAGAGAACATTGATAATAAACGCCTGCTGGTCGAAGATGAAAAACGCGCTGAAGATTATAAAGGCGTGAAAA
AACTGCTGGATCGCTATTATCTGAGCTTCATTAACGATGTGCTGCACAGCATTAAACTGAAGAACCTGAACAACTAT
ATCAGCCTGTTTCGTAAAAAAACCCGCACCGAAAAAGAAAACAAAGAGCTGGAAAACCTGGAAATCAATCTGCGTAA
AGAAATCGCCAAAGCGTTTAAAGGTAACGAGGGTTATAAAAGCCTGTTCAAGAAAGACATCATCGAAACCATTCTGC
CGGAATTTCTGGATGATAAAGATGAAATTGCCCTGGTGAATAGCTTTAATGGCTTTACCACCGCATTTACCGGCTTT
TTTGATAATCGCGAAAACATGTTCAGCGAAGAAGCAAAAAGCACCAGCATTGCATTTCGCTGCATTAATGAAAATCT
GACCCGCTACATTAGCAACATGGATATCTTTGAAAAAGTGGACGCGATCTTCGATAAACACGAAGTGCAAGAGATCA
AAGAGAAAATCCTGAACAGCGATTATGACGTCGAAGATTTTTTTGAAGGCGAGTTCTTTAACTTCGTTCTGACCCAA
GAAGGTATCGACGTTTATAACGCAATTATTGGTGGTTTTGTTACCGAAAGCGGTGAGAAAATCAAAGGCCTGAATGA
ATATATCAACCTGTATAACCAGAAAACCAAACAGAAACTGCCGAAATTCAAACCGCTGTATAAACAGGTTCTGAGCG
ATCGTGAAAGCCTGAGCTTTTATGGTGAAGGTTATACCAGTGATGAAGAGGTTCTGGAAGTTTTTCGTAACACCCTG
AATAAAAACAGCGAGATCTTTAGCAGCATCAAAAAGCTTGAGAAACTGTTCAAAAACTTTGATGAGTATAGCAGCGC
AGGCATCTTTGTTAAAAATGGTCCGGCAATTAGCACCATCAGCAAAGATATTTTTGGCGAATGGAATGTGATCCGCG
ATAAATGGAATGCCGAATATGATGATATCCACCTGAAAAAAAAGGCCGTGGTGACCGAGAAATATGAAGATGATCGT
CGTAAAAGCTTCAAGAAAATTGGTAGCTTTAGCCTGGAACAGCTGCAAGAATATGCAGATGCAGATCTGAGCGTTGT
GGAAAAACTGAAAGAAATCATCATTCAGAAGGTGGACGAGATCTATAAAGTTTATGGTAGCAGCGAAAAACTGTTCG
ATGCAGATTTTGTTCTGGAAAAAAGCCTGAAAAAGAATGATGCCGTTGTGGCCATTATGAAAGATCTGCTGGATAGC
GTTAAGAGCTTCGAGAATTACATCAAAGCCTTTTTTGGTGAGGGCAAAGAAACCAATCGTGATGAAAGTTTCTATGG
CGATTTTGTGCTGGCCTATGATATTCTGCTGAAAGTGGACCATATTTATGATGCCATTCGCAATTATGTTACCCAGA
AACCGTATAGCAAAGACAAGTTCAAACTGTACTTTCAGAACCCGCAGTTTATGGGTGGTTGGGATAAAGATAAAGAA
ACCGATTATCGTGCCACCATCCTGCGTTATGGTAGTAAATACTATCTGGCCATCATGGACAAAAAATACGCAAAATG
CCTGCAGAAAATCGACAAAGATGATGTGAATGGCAACTATGAAAAAATCAACTACAAACTGCTGCCTGGTCCGAATA
AAATGCTGCCGAAAGTGTTCTTTAGCAAGAAATGGATGGCCTATTATAACCCGAGCGAGGATATTCAAAAGATCTAC
AAAAATGGCACCTTTAAAAAGGGCGACATGTTCAATCTGAACGATTGCCACAAACTGATCGATTTCTTCAAAGATTC
AATTTCGCGTTATCCGAAATGGTCCAATGCCTATGATTTTAACTTTAGCGAAACCGAAAAATACAAAGACATTGCCG
GTTTTTATCGCGAAGTGGAAGAACAGGGCTATAAAGTGAGCTTTGAAAGCGCAAGCAAAAAAGAGGTTGATAAGCTG
GTTGAAGAGGGCAAACTGTATATGTTCCAGATTTACAACAAAGATTTTAGCGACAAAAGCCATGGCACCCCGAATCT
GCATACCATGTACTTTAAACTGCTGTTCGACGAAAATAACCATGGTCAGATTCGTCTGAGCGGTGGTGCCGAACTGT
TTATGCGTCGTGCAAGTCTGAAAAAAGAAGAACTGGTTGTTCATCCGGCAAATAGCCCGATTGCAAACAAAAATCCG
GACAATCCGAAAAAAACCACGACACTGAGCTATGATGTGTATAAAGACAAACGTTTTAGCGAGGATCAGTATCTGCT
GCATATCCCGATTGCCATCAATAAATGCCCGAAAAACATCTTTAAGATCAACACCGAAGTTCGCGTGCTGCTGAAAC
ATGATGATAATCCGTATGTGATTGGCATTGATCGTGGTGAACGTAACCTGCTGTATATTGTTGTTGTTGATGGTAAA
GGCAACATCGTGGAACAGTATAGTCTGAACGAAATTATCAACAACTTTAACGGCATCCGCATCAAAACCGACTATCA
TAGCCTGCTGGACAAGAAAGAAAAAGAACGTTTTGAAGCACGTCAGAACTGGACCAGTATTGAAAACATCAAAGAAC
TGAAAGCCGGTTATATTAGCCAGGTGGTTCATAAAATCTGTGAGCTGGTAGAAAAATACGATGCAGTTATTGCACTG
GAAGATCTGAATAGCGGTTTCAAAAATAGCCGTGTGAAAGTCGAAAAACAGGTGTATCAGAAATTCGAGAAAATGCT
GATCGACAAACTGAACTACATGGTCGACAAAAAAAGCAATCCGTGTGCAACCGGTGGTGCACTGAAAGGTTATCAGA
TTACCAACAAATTTGAAAGCTTTAAAAGCATGAGCACCCAGAACGGCTTTATCTTCTATATTCCGGCATGGCTGACC
AGCAAAATTGATCCGAGCACCGGTTTTGTGAACCTGCTGAAAACAAAATATACCTCCATTGCCGACAGCAAGAAGTT
TATTAGCAGCTTTGATCGCATTATGTATGTTCCGGAAGAGGACCTGTTTGAATTCGCACTGGATTACAAAAATTTCA
GCCGTACCGATGCCGACTACATCAAAAAATGGAAACTGTACAGCTATGGTAACCGCATTCGCATTTTTCGCAACCCG
AAGAAAAACAATGTGTTCGATTGGGAAGAAGTTTGTCTGACCAGCGCATATAAAGAACTTTTCAACAAATACGGCAT
CAACTATCAGCAGGGTGATATTCGTGCACTGCTGTGTGAACAGAGCGATAAAGCGTTTTATAGCAGTTTTATGGCAC
TGATGAGCCTGATGCTGCAGATGCGTAATAGCATTACCGGTCGCACCGATGTGGATTTTCTGATTAGTCCGGTGAAA
AATTCCGATGGCATCTTTTATGATAGCCGCAATTACGAAGCACAAGAAAATGCAATTCTGCCGAAAAACGCAGATGC
AAATGGTGCATATAACATTGCACGTAAAGTTCTGTGGGCAATTGGCCAGTTTAAGAAAGCAGAAGATGAGAAGCTGG
ACAAAGTGAAAATTGCGATCAGCAATAAAGAGTGGCTGGAATACGCACAGACCAGCGTTAAACATGCGCCAGCGCCT
GCTCCTGCACCCGCTCCAGCGCCAGCTCCTGCACCTGCGATGGTTAGCAAAGGTGAAGAACTGTTTACCGGCGTTGT
GCCGATTCTGGTGGAACTGGATGGTGATGTGAATGGCCATAAATTTAGCGTTAGCGGCGAAGGCGAAGGTGATGCGA
CCTATGGTAAACTGACCCTGAAATTTATTTGCACCACCGGTAAACTGCCGGTTCCGTGGCCGACCCTGGTGACCACC
CTGACCTATGGCGTTCAGTGCTTTAGCCGCTATCCGGATCATATGAAACAGCATGATTTCTTTAAAAGCGCGATGCC
GGAAGGCTATGTGCAGGAACGTACCATTTTTTTCAAAGATGATGGCAACTATAAAACCCGTGCGGAAGTTAAATTTG
AAGGCGATACCCTGGTGAACCGCATTGAACTGAAAGGTATTGATTTTAAAGAAGATGGCAACATTCTGGGTCATAAA
CTGGAATATAATTACAACAGCCATAATGTGTATATTATGGCCGATAAACAGAAAAATGGCATCAAAGTGAACTTTAA
AATCCGTCACAACATTGAAGATGGTAGCGTGCAGCTGGCGGATCATTATCAGCAGAATACCCCGATTGGTGATGGCC
CGGTGCTGCTGCCGGATAATCATTATCTGAGCACCCAGAGCGCGCTGAGCAAAGATCCGAATGAAAAACGTGATCAT
ATGGTGCTGCTGGAATTTGTTACCGCCGCGGGCATTACCCTGGGTATGGATGAACTGTATAAA
(LbCas12a (E795L)-APAPAPAPAPAPAPAPAPA(SEQ ID NO: 18)-
eGFP chimera DNA sequence)
SEQ ID NO: 403
ATGAGCAAACTGGAAAAGTTCACCAACTGTTATAGCCTGAGCAAAACCCTGCGTTTTAAAGCAATTCCGGTTGGTAA
AACCCAAGAGAACATTGATAATAAACGCCTGCTGGTCGAAGATGAAAAACGCGCTGAAGATTATAAAGGCGTGAAAA
AACTGCTGGATCGCTATTATCTGAGCTTCATTAACGATGTGCTGCACAGCATTAAACTGAAGAACCTGAACAACTAT
ATCAGCCTGTTTCGTAAAAAAACCCGCACCGAAAAAGAAAACAAAGAGCTGGAAAACCTGGAAATCAATCTGCGTAA
AGAAATCGCCAAAGCGTTTAAAGGTAACGAGGGTTATAAAAGCCTGTTCAAGAAAGACATCATCGAAACCATTCTGC
CGGAATTTCTGGATGATAAAGATGAAATTGCCCTGGTGAATAGCTTTAATGGCTTTACCACCGCATTTACCGGCTTT
TTTGATAATCGCGAAAACATGTTCAGCGAAGAAGCAAAAAGCACCAGCATTGCATTTCGCTGCATTAATGAAAATCT
GACCCGCTACATTAGCAACATGGATATCTTTGAAAAAGTGGACGCGATCTTCGATAAACACGAAGTGCAAGAGATCA
AAGAGAAAATCCTGAACAGCGATTATGACGTCGAAGATTTTTTTGAAGGCGAGTTCTTTAACTTCGTTCTGACCCAA
GAAGGTATCGACGTTTATAACGCAATTATTGGTGGTTTTGTTACCGAAAGCGGTGAGAAAATCAAAGGCCTGAATGA
ATATATCAACCTGTATAACCAGAAAACCAAACAGAAACTGCCGAAATTCAAACCGCTGTATAAACAGGTTCTGAGCG
ATCGTGAAAGCCTGAGCTTTTATGGTGAAGGTTATACCAGTGATGAAGAGGTTCTGGAAGTTTTTCGTAACACCCTG
AATAAAAACAGCGAGATCTTTAGCAGCATCAAAAAGCTTGAGAAACTGTTCAAAAACTTTGATGAGTATAGCAGCGC
AGGCATCTTTGTTAAAAATGGTCCGGCAATTAGCACCATCAGCAAAGATATTTTTGGCGAATGGAATGTGATCCGCG
ATAAATGGAATGCCGAATATGATGATATCCACCTGAAAAAAAAGGCCGTGGTGACCGAGAAATATGAAGATGATCGT
CGTAAAAGCTTCAAGAAAATTGGTAGCTTTAGCCTGGAACAGCTGCAAGAATATGCAGATGCAGATCTGAGCGTTGT
GGAAAAACTGAAAGAAATCATCATTCAGAAGGTGGACGAGATCTATAAAGTTTATGGTAGCAGCGAAAAACTGTTCG
ATGCAGATTTTGTTCTGGAAAAAAGCCTGAAAAAGAATGATGCCGTTGTGGCCATTATGAAAGATCTGCTGGATAGC
GTTAAGAGCTTCGAGAATTACATCAAAGCCTTTTTTGGTGAGGGCAAAGAAACCAATCGTGATGAAAGTTTCTATGG
CGATTTTGTGCTGGCCTATGATATTCTGCTGAAAGTGGACCATATTTATGATGCCATTCGCAATTATGTTACCCAGA
AACCGTATAGCAAAGACAAGTTCAAACTGTACTTTCAGAACCCGCAGTTTATGGGTGGTTGGGATAAAGATAAAGAA
ACCGATTATCGTGCCACCATCCTGCGTTATGGTAGTAAATACTATCTGGCCATCATGGACAAAAAATACGCAAAATG
CCTGCAGAAAATCGACAAAGATGATGTGAATGGCAACTATGAAAAAATCAACTACAAACTGCTGCCTGGTCCGAATA
AAATGCTGCCGAAAGTGTTCTTTAGCAAGAAATGGATGGCCTATTATAACCCGAGCGAGGATATTCAAAAGATCTAC
AAAAATGGCACCTTTAAAAAGGGCGACATGTTCAATCTGAACGATTGCCACAAACTGATCGATTTCTTCAAAGATTC
AATTTCGCGTTATCCGAAATGGTCCAATGCCTATGATTTTAACTTTAGCGAAACCGAAAAATACAAAGACATTGCCG
GTTTTTATCGCGAAGTGGAAGAACAGGGCTATAAAGTGAGCTTTGAAAGCGCAAGCAAAAAAGAGGTTGATAAGCTG
GTTGAAGAGGGCAAACTGTATATGTTCCAGATTTACAACAAAGATTTTAGCGACAAAAGCCATGGCACCCCGAATCT
GCATACCATGTACTTTAAACTGCTGTTCGACGAAAATAACCATGGTCAGATTCGTCTGAGCGGTGGTGCCGAACTGT
TTATGCGTCGTGCAAGTCTGAAAAAAGAAGAACTGGTTGTTCATCCGGCAAATAGCCCGATTGCAAACAAAAATCCG
GACAATCCGAAAAAAACCACGACACTGAGCTATGATGTGTATAAAGACAAACGTTTTAGCGAGGATCAGTATCTGCT
GCATATCCCGATTGCCATCAATAAATGCCCGAAAAACATCTTTAAGATCAACACCGAAGTTCGCGTGCTGCTGAAAC
ATGATGATAATCCGTATGTGATTGGCATTGATCGTGGTGAACGTAACCTGCTGTATATTGTTGTTGTTGATGGTAAA
GGCAACATCGTGGAACAGTATAGTCTGAACGAAATTATCAACAACTTTAACGGCATCCGCATCAAAACCGACTATCA
TAGCCTGCTGGACAAGAAAGAAAAAGAACGTTTTGAAGCACGTCAGAACTGGACCAGTATTGAAAACATCAAAGAAC
TGAAAGCCGGTTATATTAGCCAGGTGGTTCATAAAATCTGTGAGCTGGTAGAAAAATACGATGCAGTTATTGCACTG
GAAGATCTGAATAGCGGTTTCAAAAATAGCCGTGTGAAAGTCGAAAAACAGGTGTATCAGAAATTCGAGAAAATGCT
GATCGACAAACTGAACTACATGGTCGACAAAAAAAGCAATCCGTGTGCAACCGGTGGTGCACTGAAAGGTTATCAGA
TTACCAACAAATTTGAAAGCTTTAAAAGCATGAGCACCCAGAACGGCTTTATCTTCTATATTCCGGCATGGCTGACC
AGCAAAATTGATCCGAGCACCGGTTTTGTGAACCTGCTGAAAACAAAATATACCTCCATTGCCGACAGCAAGAAGTT
TATTAGCAGCTTTGATCGCATTATGTATGTTCCGGAAGAGGACCTGTTTGAATTCGCACTGGATTACAAAAATTTCA
GCCGTACCGATGCCGACTACATCAAAAAATGGAAACTGTACAGCTATGGTAACCGCATTCGCATTTTTCGCAACCCG
AAGAAAAACAATGTGTTCGATTGGGAAGAAGTTTGTCTGACCAGCGCATATAAAGAACTTTTCAACAAATACGGCAT
CAACTATCAGCAGGGTGATATTCGTGCACTGCTGTGTGAACAGAGCGATAAAGCGTTTTATAGCAGTTTTATGGCAC
TGATGAGCCTGATGCTGCAGATGCGTAATAGCATTACCGGTCGCACCGATGTGGATTTTCTGATTAGTCCGGTGAAA
AATTCCGATGGCATCTTTTATGATAGCCGCAATTACGAAGCACAAGAAAATGCAATTCTGCCGAAAAACGCAGATGC
AAATGGTGCATATAACATTGCACGTAAAGTTCTGTGGGCAATTGGCCAGTTTAAGAAAGCAGAAGATGAGAAGCTGG
ACAAAGTGAAAATTGCGATCAGCAATAAAGAGTGGCTGGAATACGCACAGACCAGCGTTAAACATGCGCCAGCGCCT
GCTCCTGCACCCGCTCCAGCTCCTGCGCCAGCTCCTGCACCTGCGATGGTTAGCAAAGGTGAAGAACTGTTTACCGG
CGTTGTGCCGATTCTGGTGGAACTGGATGGTGATGTGAATGGCCATAAATTTAGCGTTAGCGGCGAAGGCGAAGGTG
ATGCGACCTATGGTAAACTGACCCTGAAATTTATTTGCACCACCGGTAAACTGCCGGTTCCGTGGCCGACCCTGGTG
ACCACCCTGACCTATGGCGTTCAGTGCTTTAGCCGCTATCCGGATCATATGAAACAGCATGATTTCTTTAAAAGCGC
GATGCCGGAAGGCTATGTGCAGGAACGTACCATTTTTTTCAAAGATGATGGCAACTATAAAACCCGTGCGGAAGTTA
AATTTGAAGGCGATACCCTGGTGAACCGCATTGAACTGAAAGGTATTGATTTTAAAGAAGATGGCAACATTCTGGGT
CATAAACTGGAATATAATTACAACAGCCATAATGTGTATATTATGGCCGATAAACAGAAAAATGGCATCAAAGTGAA
CTTTAAAATCCGTCACAACATTGAAGATGGTAGCGTGCAGCTGGCGGATCATTATCAGCAGAATACCCCGATTGGTG
ATGGCCCGGTGCTGCTGCCGGATAATCATTATCTGAGCACCCAGAGCGCGCTGAGCAAAGATCCGAATGAAAAACGT
GATCATATGGTGCTGCTGGAATTTGTTACCGCCGCGGGCATTACCCTGGGTATGGATGAACTGTATAAA
(LbCas12a (E795L)-APAPAPAPAPAPAPAPAPAPA(SEQ ID NO: 19)-
eGFP chimera DNA sequence)
SEQ ID NO: 404
ATGAGCAAACTGGAAAAGTTCACCAACTGTTATAGCCTGAGCAAAACCCTGCGTTTTAAAGCAATTCCGGTTGGTAA
AACCCAAGAGAACATTGATAATAAACGCCTGCTGGTCGAAGATGAAAAACGCGCTGAAGATTATAAAGGCGTGAAAA
AACTGCTGGATCGCTATTATCTGAGCTTCATTAACGATGTGCTGCACAGCATTAAACTGAAGAACCTGAACAACTAT
ATCAGCCTGTTTCGTAAAAAAACCCGCACCGAAAAAGAAAACAAAGAGCTGGAAAACCTGGAAATCAATCTGCGTAA
AGAAATCGCCAAAGCGTTTAAAGGTAACGAGGGTTATAAAAGCCTGTTCAAGAAAGACATCATCGAAACCATTCTGC
CGGAATTTCTGGATGATAAAGATGAAATTGCCCTGGTGAATAGCTTTAATGGCTTTACCACCGCATTTACCGGCTTT
TTTGATAATCGCGAAAACATGTTCAGCGAAGAAGCAAAAAGCACCAGCATTGCATTTCGCTGCATTAATGAAAATCT
GACCCGCTACATTAGCAACATGGATATCTTTGAAAAAGTGGACGCGATCTTCGATAAACACGAAGTGCAAGAGATCA
AAGAGAAAATCCTGAACAGCGATTATGACGTCGAAGATTTTTTTGAAGGCGAGTTCTTTAACTTCGTTCTGACCCAA
GAAGGTATCGACGTTTATAACGCAATTATTGGTGGTTTTGTTACCGAAAGCGGTGAGAAAATCAAAGGCCTGAATGA
ATATATCAACCTGTATAACCAGAAAACCAAACAGAAACTGCCGAAATTCAAACCGCTGTATAAACAGGTTCTGAGCG
ATCGTGAAAGCCTGAGCTTTTATGGTGAAGGTTATACCAGTGATGAAGAGGTTCTGGAAGTTTTTCGTAACACCCTG
AATAAAAACAGCGAGATCTTTAGCAGCATCAAAAAGCTTGAGAAACTGTTCAAAAACTTTGATGAGTATAGCAGCGC
AGGCATCTTTGTTAAAAATGGTCCGGCAATTAGCACCATCAGCAAAGATATTTTTGGCGAATGGAATGTGATCCGCG
ATAAATGGAATGCCGAATATGATGATATCCACCTGAAAAAAAAGGCCGTGGTGACCGAGAAATATGAAGATGATCGT
CGTAAAAGCTTCAAGAAAATTGGTAGCTTTAGCCTGGAACAGCTGCAAGAATATGCAGATGCAGATCTGAGCGTTGT
GGAAAAACTGAAAGAAATCATCATTCAGAAGGTGGACGAGATCTATAAAGTTTATGGTAGCAGCGAAAAACTGTTCG
ATGCAGATTTTGTTCTGGAAAAAAGCCTGAAAAAGAATGATGCCGTTGTGGCCATTATGAAAGATCTGCTGGATAGC
GTTAAGAGCTTCGAGAATTACATCAAAGCCTTTTTTGGTGAGGGCAAAGAAACCAATCGTGATGAAAGTTTCTATGG
CGATTTTGTGCTGGCCTATGATATTCTGCTGAAAGTGGACCATATTTATGATGCCATTCGCAATTATGTTACCCAGA
AACCGTATAGCAAAGACAAGTTCAAACTGTACTTTCAGAACCCGCAGTTTATGGGTGGTTGGGATAAAGATAAAGAA
ACCGATTATCGTGCCACCATCCTGCGTTATGGTAGTAAATACTATCTGGCCATCATGGACAAAAAATACGCAAAATG
CCTGCAGAAAATCGACAAAGATGATGTGAATGGCAACTATGAAAAAATCAACTACAAACTGCTGCCTGGTCCGAATA
AAATGCTGCCGAAAGTGTTCTTTAGCAAGAAATGGATGGCCTATTATAACCCGAGCGAGGATATTCAAAAGATCTAC
AAAAATGGCACCTTTAAAAAGGGCGACATGTTCAATCTGAACGATTGCCACAAACTGATCGATTTCTTCAAAGATTC
AATTTCGCGTTATCCGAAATGGTCCAATGCCTATGATTTTAACTTTAGCGAAACCGAAAAATACAAAGACATTGCCG
GTTTTTATCGCGAAGTGGAAGAACAGGGCTATAAAGTGAGCTTTGAAAGCGCAAGCAAAAAAGAGGTTGATAAGCTG
GTTGAAGAGGGCAAACTGTATATGTTCCAGATTTACAACAAAGATTTTAGCGACAAAAGCCATGGCACCCCGAATCT
GCATACCATGTACTTTAAACTGCTGTTCGACGAAAATAACCATGGTCAGATTCGTCTGAGCGGTGGTGCCGAACTGT
TTATGCGTCGTGCAAGTCTGAAAAAAGAAGAACTGGTTGTTCATCCGGCAAATAGCCCGATTGCAAACAAAAATCCG
GACAATCCGAAAAAAACCACGACACTGAGCTATGATGTGTATAAAGACAAACGTTTTAGCGAGGATCAGTATCTGCT
GCATATCCCGATTGCCATCAATAAATGCCCGAAAAACATCTTTAAGATCAACACCGAAGTTCGCGTGCTGCTGAAAC
ATGATGATAATCCGTATGTGATTGGCATTGATCGTGGTGAACGTAACCTGCTGTATATTGTTGTTGTTGATGGTAAA
GGCAACATCGTGGAACAGTATAGTCTGAACGAAATTATCAACAACTTTAACGGCATCCGCATCAAAACCGACTATCA
TAGCCTGCTGGACAAGAAAGAAAAAGAACGTTTTGAAGCACGTCAGAACTGGACCAGTATTGAAAACATCAAAGAAC
TGAAAGCCGGTTATATTAGCCAGGTGGTTCATAAAATCTGTGAGCTGGTAGAAAAATACGATGCAGTTATTGCACTG
GAAGATCTGAATAGCGGTTTCAAAAATAGCCGTGTGAAAGTCGAAAAACAGGTGTATCAGAAATTCGAGAAAATGCT
GATCGACAAACTGAACTACATGGTCGACAAAAAAAGCAATCCGTGTGCAACCGGTGGTGCACTGAAAGGTTATCAGA
TTACCAACAAATTTGAAAGCTTTAAAAGCATGAGCACCCAGAACGGCTTTATCTTCTATATTCCGGCATGGCTGACC
AGCAAAATTGATCCGAGCACCGGTTTTGTGAACCTGCTGAAAACAAAATATACCTCCATTGCCGACAGCAAGAAGTT
TATTAGCAGCTTTGATCGCATTATGTATGTTCCGGAAGAGGACCTGTTTGAATTCGCACTGGATTACAAAAATTTCA
GCCGTACCGATGCCGACTACATCAAAAAATGGAAACTGTACAGCTATGGTAACCGCATTCGCATTTTTCGCAACCCG
AAGAAAAACAATGTGTTCGATTGGGAAGAAGTTTGTCTGACCAGCGCATATAAAGAACTTTTCAACAAATACGGCAT
CAACTATCAGCAGGGTGATATTCGTGCACTGCTGTGTGAACAGAGCGATAAAGCGTTTTATAGCAGTTTTATGGCAC
TGATGAGCCTGATGCTGCAGATGCGTAATAGCATTACCGGTCGCACCGATGTGGATTTTCTGATTAGTCCGGTGAAA
AATTCCGATGGCATCTTTTATGATAGCCGCAATTACGAAGCACAAGAAAATGCAATTCTGCCGAAAAACGCAGATGC
AAATGGTGCATATAACATTGCACGTAAAGTTCTGTGGGCAATTGGCCAGTTTAAGAAAGCAGAAGATGAGAAGCTGG
ACAAAGTGAAAATTGCGATCAGCAATAAAGAGTGGCTGGAATACGCACAGACCAGCGTTAAACATGCGCCAGCGCCT
GCTCCTGCACCCGCTCCAGCTCCTGCTCCTGCGCCAGCTCCTGCACCTGCGATGGTTAGCAAAGGTGAAGAACTGTT
TACCGGCGTTGTGCCGATTCTGGTGGAACTGGATGGTGATGTGAATGGCCATAAATTTAGCGTTAGCGGCGAAGGCG
AAGGTGATGCGACCTATGGTAAACTGACCCTGAAATTTATTTGCACCACCGGTAAACTGCCGGTTCCGTGGCCGACC
CTGGTGACCACCCTGACCTATGGCGTTCAGTGCTTTAGCCGCTATCCGGATCATATGAAACAGCATGATTTCTTTAA
AAGCGCGATGCCGGAAGGCTATGTGCAGGAACGTACCATTTTTTTCAAAGATGATGGCAACTATAAAACCCGTGCGG
AAGTTAAATTTGAAGGCGATACCCTGGTGAACCGCATTGAACTGAAAGGTATTGATTTTAAAGAAGATGGCAACATT
CTGGGTCATAAACTGGAATATAATTACAACAGCCATAATGTGTATATTATGGCCGATAAACAGAAAAATGGCATCAA
AGTGAACTTTAAAATCCGTCACAACATTGAAGATGGTAGCGTGCAGCTGGCGGATCATTATCAGCAGAATACCCCGA
TTGGTGATGGCCCGGTGCTGCTGCCGGATAATCATTATCTGAGCACCCAGAGCGCGCTGAGCAAAGATCCGAATGAA
AAACGTGATCATATGGTGCTGCTGGAATTTGTTACCGCCGCGGGCATTACCCTGGGTATGGATGAACTGTATAAA
(LbCas12a (E795L)-APAPAPAPAPAPAPAPAPAPAPA(SEQ ID NO: 20)-
eGFP chimera DNA sequence)
SEQ ID NO: 405
ATGAGCAAACTGGAAAAGTTCACCAACTGTTATAGCCTGAGCAAAACCCTGCGTTTTAAAGCAATTCCGGTTGGTAA
AACCCAAGAGAACATTGATAATAAACGCCTGCTGGTCGAAGATGAAAAACGCGCTGAAGATTATAAAGGCGTGAAAA
AACTGCTGGATCGCTATTATCTGAGCTTCATTAACGATGTGCTGCACAGCATTAAACTGAAGAACCTGAACAACTAT
ATCAGCCTGTTTCGTAAAAAAACCCGCACCGAAAAAGAAAACAAAGAGCTGGAAAACCTGGAAATCAATCTGCGTAA
AGAAATCGCCAAAGCGTTTAAAGGTAACGAGGGTTATAAAAGCCTGTTCAAGAAAGACATCATCGAAACCATTCTGC
CGGAATTTCTGGATGATAAAGATGAAATTGCCCTGGTGAATAGCTTTAATGGCTTTACCACCGCATTTACCGGCTTT
TTTGATAATCGCGAAAACATGTTCAGCGAAGAAGCAAAAAGCACCAGCATTGCATTTCGCTGCATTAATGAAAATCT
GACCCGCTACATTAGCAACATGGATATCTTTGAAAAAGTGGACGCGATCTTCGATAAACACGAAGTGCAAGAGATCA
AAGAGAAAATCCTGAACAGCGATTATGACGTCGAAGATTTTTTTGAAGGCGAGTTCTTTAACTTCGTTCTGACCCAA
GAAGGTATCGACGTTTATAACGCAATTATTGGTGGTTTTGTTACCGAAAGCGGTGAGAAAATCAAAGGCCTGAATGA
ATATATCAACCTGTATAACCAGAAAACCAAACAGAAACTGCCGAAATTCAAACCGCTGTATAAACAGGTTCTGAGCG
ATCGTGAAAGCCTGAGCTTTTATGGTGAAGGTTATACCAGTGATGAAGAGGTTCTGGAAGTTTTTCGTAACACCCTG
AATAAAAACAGCGAGATCTTTAGCAGCATCAAAAAGCTTGAGAAACTGTTCAAAAACTTTGATGAGTATAGCAGCGC
AGGCATCTTTGTTAAAAATGGTCCGGCAATTAGCACCATCAGCAAAGATATTTTTGGCGAATGGAATGTGATCCGCG
ATAAATGGAATGCCGAATATGATGATATCCACCTGAAAAAAAAGGCCGTGGTGACCGAGAAATATGAAGATGATCGT
CGTAAAAGCTTCAAGAAAATTGGTAGCTTTAGCCTGGAACAGCTGCAAGAATATGCAGATGCAGATCTGAGCGTTGT
GGAAAAACTGAAAGAAATCATCATTCAGAAGGTGGACGAGATCTATAAAGTTTATGGTAGCAGCGAAAAACTGTTCG
ATGCAGATTTTGTTCTGGAAAAAAGCCTGAAAAAGAATGATGCCGTTGTGGCCATTATGAAAGATCTGCTGGATAGC
GTTAAGAGCTTCGAGAATTACATCAAAGCCTTTTTTGGTGAGGGCAAAGAAACCAATCGTGATGAAAGTTTCTATGG
CGATTTTGTGCTGGCCTATGATATTCTGCTGAAAGTGGACCATATTTATGATGCCATTCGCAATTATGTTACCCAGA
AACCGTATAGCAAAGACAAGTTCAAACTGTACTTTCAGAACCCGCAGTTTATGGGTGGTTGGGATAAAGATAAAGAA
ACCGATTATCGTGCCACCATCCTGCGTTATGGTAGTAAATACTATCTGGCCATCATGGACAAAAAATACGCAAAATG
CCTGCAGAAAATCGACAAAGATGATGTGAATGGCAACTATGAAAAAATCAACTACAAACTGCTGCCTGGTCCGAATA
AAATGCTGCCGAAAGTGTTCTTTAGCAAGAAATGGATGGCCTATTATAACCCGAGCGAGGATATTCAAAAGATCTAC
AAAAATGGCACCTTTAAAAAGGGCGACATGTTCAATCTGAACGATTGCCACAAACTGATCGATTTCTTCAAAGATTC
AATTTCGCGTTATCCGAAATGGTCCAATGCCTATGATTTTAACTTTAGCGAAACCGAAAAATACAAAGACATTGCCG
GTTTTTATCGCGAAGTGGAAGAACAGGGCTATAAAGTGAGCTTTGAAAGCGCAAGCAAAAAAGAGGTTGATAAGCTG
GTTGAAGAGGGCAAACTGTATATGTTCCAGATTTACAACAAAGATTTTAGCGACAAAAGCCATGGCACCCCGAATCT
GCATACCATGTACTTTAAACTGCTGTTCGACGAAAATAACCATGGTCAGATTCGTCTGAGCGGTGGTGCCGAACTGT
TTATGCGTCGTGCAAGTCTGAAAAAAGAAGAACTGGTTGTTCATCCGGCAAATAGCCCGATTGCAAACAAAAATCCG
GACAATCCGAAAAAAACCACGACACTGAGCTATGATGTGTATAAAGACAAACGTTTTAGCGAGGATCAGTATCTGCT
GCATATCCCGATTGCCATCAATAAATGCCCGAAAAACATCTTTAAGATCAACACCGAAGTTCGCGTGCTGCTGAAAC
ATGATGATAATCCGTATGTGATTGGCATTGATCGTGGTGAACGTAACCTGCTGTATATTGTTGTTGTTGATGGTAAA
GGCAACATCGTGGAACAGTATAGTCTGAACGAAATTATCAACAACTTTAACGGCATCCGCATCAAAACCGACTATCA
TAGCCTGCTGGACAAGAAAGAAAAAGAACGTTTTGAAGCACGTCAGAACTGGACCAGTATTGAAAACATCAAAGAAC
TGAAAGCCGGTTATATTAGCCAGGTGGTTCATAAAATCTGTGAGCTGGTAGAAAAATACGATGCAGTTATTGCACTG
GAAGATCTGAATAGCGGTTTCAAAAATAGCCGTGTGAAAGTCGAAAAACAGGTGTATCAGAAATTCGAGAAAATGCT
GATCGACAAACTGAACTACATGGTCGACAAAAAAAGCAATCCGTGTGCAACCGGTGGTGCACTGAAAGGTTATCAGA
TTACCAACAAATTTGAAAGCTTTAAAAGCATGAGCACCCAGAACGGCTTTATCTTCTATATTCCGGCATGGCTGACC
AGCAAAATTGATCCGAGCACCGGTTTTGTGAACCTGCTGAAAACAAAATATACCTCCATTGCCGACAGCAAGAAGTT
TATTAGCAGCTTTGATCGCATTATGTATGTTCCGGAAGAGGACCTGTTTGAATTCGCACTGGATTACAAAAATTTCA
GCCGTACCGATGCCGACTACATCAAAAAATGGAAACTGTACAGCTATGGTAACCGCATTCGCATTTTTCGCAACCCG
AAGAAAAACAATGTGTTCGATTGGGAAGAAGTTTGTCTGACCAGCGCATATAAAGAACTTTTCAACAAATACGGCAT
CAACTATCAGCAGGGTGATATTCGTGCACTGCTGTGTGAACAGAGCGATAAAGCGTTTTATAGCAGTTTTATGGCAC
TGATGAGCCTGATGCTGCAGATGCGTAATAGCATTACCGGTCGCACCGATGTGGATTTTCTGATTAGTCCGGTGAAA
AATTCCGATGGCATCTTTTATGATAGCCGCAATTACGAAGCACAAGAAAATGCAATTCTGCCGAAAAACGCAGATGC
AAATGGTGCATATAACATTGCACGTAAAGTTCTGTGGGCAATTGGCCAGTTTAAGAAAGCAGAAGATGAGAAGCTGG
ACAAAGTGAAAATTGCGATCAGCAATAAAGAGTGGCTGGAATACGCACAGACCAGCGTTAAACATGCGCCAGCGCCT
GCTCCTGCACCCGCTCCAGCTCCTGCCCCAGCTCCAGCGCCCGCTCCTGCACCTGCGATGGTTAGCAAAGGTGAAGA
ACTGTTTACCGGCGTTGTGCCGATTCTGGTGGAACTGGATGGTGATGTGAATGGCCATAAATTTAGCGTTAGCGGCG
AAGGCGAAGGTGATGCGACCTATGGTAAACTGACCCTGAAATTTATTTGCACCACCGGTAAACTGCCGGTTCCGTGG
CCGACCCTGGTGACCACCCTGACCTATGGCGTTCAGTGCTTTAGCCGCTATCCGGATCATATGAAACAGCATGATTT
CTTTAAAAGCGCGATGCCGGAAGGCTATGTGCAGGAACGTACCATTTTTTTCAAAGATGATGGCAACTATAAAACCC
GTGCGGAAGTTAAATTTGAAGGCGATACCCTGGTGAACCGCATTGAACTGAAAGGTATTGATTTTAAAGAAGATGGC
AACATTCTGGGTCATAAACTGGAATATAATTACAACAGCCATAATGTGTATATTATGGCCGATAAACAGAAAAATGG
CATCAAAGTGAACTTTAAAATCCGTCACAACATTGAAGATGGTAGCGTGCAGCTGGCGGATCATTATCAGCAGAATA
CCCCGATTGGTGATGGCCCGGTGCTGCTGCCGGATAATCATTATCTGAGCACCCAGAGCGCGCTGAGCAAAGATCCG
AATGAAAAACGTGATCATATGGTGCTGCTGGAATTTGTTACCGCCGCGGGCATTACCCTGGGTATGGATGAACTGTA
TAAA
(LbCas12a (E795L)-APAPAPAPAPAPAPAPAPAPAPAPA(SEQ ID NO: 21)-
eGFP chimera DNA sequence)
SEQ ID NO: 406
ATGAGCAAACTGGAAAAGTTCACCAACTGTTATAGCCTGAGCAAAACCCTGCGTTTTAAAGCAATTCCGGTTGGTAA
AACCCAAGAGAACATTGATAATAAACGCCTGCTGGTCGAAGATGAAAAACGCGCTGAAGATTATAAAGGCGTGAAAA
AACTGCTGGATCGCTATTATCTGAGCTTCATTAACGATGTGCTGCACAGCATTAAACTGAAGAACCTGAACAACTAT
ATCAGCCTGTTTCGTAAAAAAACCCGCACCGAAAAAGAAAACAAAGAGCTGGAAAACCTGGAAATCAATCTGCGTAA
AGAAATCGCCAAAGCGTTTAAAGGTAACGAGGGTTATAAAAGCCTGTTCAAGAAAGACATCATCGAAACCATTCTGC
CGGAATTTCTGGATGATAAAGATGAAATTGCCCTGGTGAATAGCTTTAATGGCTTTACCACCGCATTTACCGGCTTT
TTTGATAATCGCGAAAACATGTTCAGCGAAGAAGCAAAAAGCACCAGCATTGCATTTCGCTGCATTAATGAAAATCT
GACCCGCTACATTAGCAACATGGATATCTTTGAAAAAGTGGACGCGATCTTCGATAAACACGAAGTGCAAGAGATCA
AAGAGAAAATCCTGAACAGCGATTATGACGTCGAAGATTTTTTTGAAGGCGAGTTCTTTAACTTCGTTCTGACCCAA
GAAGGTATCGACGTTTATAACGCAATTATTGGTGGTTTTGTTACCGAAAGCGGTGAGAAAATCAAAGGCCTGAATGA
ATATATCAACCTGTATAACCAGAAAACCAAACAGAAACTGCCGAAATTCAAACCGCTGTATAAACAGGTTCTGAGCG
ATCGTGAAAGCCTGAGCTTTTATGGTGAAGGTTATACCAGTGATGAAGAGGTTCTGGAAGTTTTTCGTAACACCCTG
AATAAAAACAGCGAGATCTTTAGCAGCATCAAAAAGCTTGAGAAACTGTTCAAAAACTTTGATGAGTATAGCAGCGC
AGGCATCTTTGTTAAAAATGGTCCGGCAATTAGCACCATCAGCAAAGATATTTTTGGCGAATGGAATGTGATCCGCG
ATAAATGGAATGCCGAATATGATGATATCCACCTGAAAAAAAAGGCCGTGGTGACCGAGAAATATGAAGATGATCGT
CGTAAAAGCTTCAAGAAAATTGGTAGCTTTAGCCTGGAACAGCTGCAAGAATATGCAGATGCAGATCTGAGCGTTGT
GGAAAAACTGAAAGAAATCATCATTCAGAAGGTGGACGAGATCTATAAAGTTTATGGTAGCAGCGAAAAACTGTTCG
ATGCAGATTTTGTTCTGGAAAAAAGCCTGAAAAAGAATGATGCCGTTGTGGCCATTATGAAAGATCTGCTGGATAGC
GTTAAGAGCTTCGAGAATTACATCAAAGCCTTTTTTGGTGAGGGCAAAGAAACCAATCGTGATGAAAGTTTCTATGG
CGATTTTGTGCTGGCCTATGATATTCTGCTGAAAGTGGACCATATTTATGATGCCATTCGCAATTATGTTACCCAGA
AACCGTATAGCAAAGACAAGTTCAAACTGTACTTTCAGAACCCGCAGTTTATGGGTGGTTGGGATAAAGATAAAGAA
ACCGATTATCGTGCCACCATCCTGCGTTATGGTAGTAAATACTATCTGGCCATCATGGACAAAAAATACGCAAAATG
CCTGCAGAAAATCGACAAAGATGATGTGAATGGCAACTATGAAAAAATCAACTACAAACTGCTGCCTGGTCCGAATA
AAATGCTGCCGAAAGTGTTCTTTAGCAAGAAATGGATGGCCTATTATAACCCGAGCGAGGATATTCAAAAGATCTAC
AAAAATGGCACCTTTAAAAAGGGCGACATGTTCAATCTGAACGATTGCCACAAACTGATCGATTTCTTCAAAGATTC
AATTTCGCGTTATCCGAAATGGTCCAATGCCTATGATTTTAACTTTAGCGAAACCGAAAAATACAAAGACATTGCCG
GTTTTTATCGCGAAGTGGAAGAACAGGGCTATAAAGTGAGCTTTGAAAGCGCAAGCAAAAAAGAGGTTGATAAGCTG
GTTGAAGAGGGCAAACTGTATATGTTCCAGATTTACAACAAAGATTTTAGCGACAAAAGCCATGGCACCCCGAATCT
GCATACCATGTACTTTAAACTGCTGTTCGACGAAAATAACCATGGTCAGATTCGTCTGAGCGGTGGTGCCGAACTGT
TTATGCGTCGTGCAAGTCTGAAAAAAGAAGAACTGGTTGTTCATCCGGCAAATAGCCCGATTGCAAACAAAAATCCG
GACAATCCGAAAAAAACCACGACACTGAGCTATGATGTGTATAAAGACAAACGTTTTAGCGAGGATCAGTATCTGCT
GCATATCCCGATTGCCATCAATAAATGCCCGAAAAACATCTTTAAGATCAACACCGAAGTTCGCGTGCTGCTGAAAC
ATGATGATAATCCGTATGTGATTGGCATTGATCGTGGTGAACGTAACCTGCTGTATATTGTTGTTGTTGATGGTAAA
GGCAACATCGTGGAACAGTATAGTCTGAACGAAATTATCAACAACTTTAACGGCATCCGCATCAAAACCGACTATCA
TAGCCTGCTGGACAAGAAAGAAAAAGAACGTTTTGAAGCACGTCAGAACTGGACCAGTATTGAAAACATCAAAGAAC
TGAAAGCCGGTTATATTAGCCAGGTGGTTCATAAAATCTGTGAGCTGGTAGAAAAATACGATGCAGTTATTGCACTG
GAAGATCTGAATAGCGGTTTCAAAAATAGCCGTGTGAAAGTCGAAAAACAGGTGTATCAGAAATTCGAGAAAATGCT
GATCGACAAACTGAACTACATGGTCGACAAAAAAAGCAATCCGTGTGCAACCGGTGGTGCACTGAAAGGTTATCAGA
TTACCAACAAATTTGAAAGCTTTAAAAGCATGAGCACCCAGAACGGCTTTATCTTCTATATTCCGGCATGGCTGACC
AGCAAAATTGATCCGAGCACCGGTTTTGTGAACCTGCTGAAAACAAAATATACCTCCATTGCCGACAGCAAGAAGTT
TATTAGCAGCTTTGATCGCATTATGTATGTTCCGGAAGAGGACCTGTTTGAATTCGCACTGGATTACAAAAATTTCA
GCCGTACCGATGCCGACTACATCAAAAAATGGAAACTGTACAGCTATGGTAACCGCATTCGCATTTTTCGCAACCCG
AAGAAAAACAATGTGTTCGATTGGGAAGAAGTTTGTCTGACCAGCGCATATAAAGAACTTTTCAACAAATACGGCAT
CAACTATCAGCAGGGTGATATTCGTGCACTGCTGTGTGAACAGAGCGATAAAGCGTTTTATAGCAGTTTTATGGCAC
TGATGAGCCTGATGCTGCAGATGCGTAATAGCATTACCGGTCGCACCGATGTGGATTTTCTGATTAGTCCGGTGAAA
AATTCCGATGGCATCTTTTATGATAGCCGCAATTACGAAGCACAAGAAAATGCAATTCTGCCGAAAAACGCAGATGC
AAATGGTGCATATAACATTGCACGTAAAGTTCTGTGGGCAATTGGCCAGTTTAAGAAAGCAGAAGATGAGAAGCTGG
ACAAAGTGAAAATTGCGATCAGCAATAAAGAGTGGCTGGAATACGCACAGACCAGCGTTAAACATGCGCCAGCGCCT
GCTCCTGCACCCGCTCCAGCTCCTGCCCCAGCTCCAGCGCCCGCTCCTGCTCCTGCACCTGCGATGGTTAGCAAAGG
TGAAGAACTGTTTACCGGCGTTGTGCCGATTCTGGTGGAACTGGATGGTGATGTGAATGGCCATAAATTTAGCGTTA
GCGGCGAAGGCGAAGGTGATGCGACCTATGGTAAACTGACCCTGAAATTTATTTGCACCACCGGTAAACTGCCGGTT
CCGTGGCCGACCCTGGTGACCACCCTGACCTATGGCGTTCAGTGCTTTAGCCGCTATCCGGATCATATGAAACAGCA
TGATTTCTTTAAAAGCGCGATGCCGGAAGGCTATGTGCAGGAACGTACCATTTTTTTCAAAGATGATGGCAACTATA
AAACCCGTGCGGAAGTTAAATTTGAAGGCGATACCCTGGTGAACCGCATTGAACTGAAAGGTATTGATTTTAAAGAA
GATGGCAACATTCTGGGTCATAAACTGGAATATAATTACAACAGCCATAATGTGTATATTATGGCCGATAAACAGAA
AAATGGCATCAAAGTGAACTTTAAAATCCGTCACAACATTGAAGATGGTAGCGTGCAGCTGGCGGATCATTATCAGC
AGAATACCCCGATTGGTGATGGCCCGGTGCTGCTGCCGGATAATCATTATCTGAGCACCCAGAGCGCGCTGAGCAAA
GATCCGAATGAAAAACGTGATCATATGGTGCTGCTGGAATTTGTTACCGCCGCGGGCATTACCCTGGGTATGGATGA
ACTGTATAAA
(LbCas12a (E795L)-APAPAPAPAPAPAPAPAPAPAPAPAPA(SEQ ID NO: 22)-
eGFP chimera DNA sequence)
SEQ ID NO: 407
ATGAGCAAACTGGAAAAGTTCACCAACTGTTATAGCCTGAGCAAAACCCTGCGTTTTAAAGCAATTCCGGTTGGTAA
AACCCAAGAGAACATTGATAATAAACGCCTGCTGGTCGAAGATGAAAAACGCGCTGAAGATTATAAAGGCGTGAAAA
AACTGCTGGATCGCTATTATCTGAGCTTCATTAACGATGTGCTGCACAGCATTAAACTGAAGAACCTGAACAACTAT
ATCAGCCTGTTTCGTAAAAAAACCCGCACCGAAAAAGAAAACAAAGAGCTGGAAAACCTGGAAATCAATCTGCGTAA
AGAAATCGCCAAAGCGTTTAAAGGTAACGAGGGTTATAAAAGCCTGTTCAAGAAAGACATCATCGAAACCATTCTGC
CGGAATTTCTGGATGATAAAGATGAAATTGCCCTGGTGAATAGCTTTAATGGCTTTACCACCGCATTTACCGGCTTT
TTTGATAATCGCGAAAACATGTTCAGCGAAGAAGCAAAAAGCACCAGCATTGCATTTCGCTGCATTAATGAAAATCT
GACCCGCTACATTAGCAACATGGATATCTTTGAAAAAGTGGACGCGATCTTCGATAAACACGAAGTGCAAGAGATCA
AAGAGAAAATCCTGAACAGCGATTATGACGTCGAAGATTTTTTTGAAGGCGAGTTCTTTAACTTCGTTCTGACCCAA
GAAGGTATCGACGTTTATAACGCAATTATTGGTGGTTTTGTTACCGAAAGCGGTGAGAAAATCAAAGGCCTGAATGA
ATATATCAACCTGTATAACCAGAAAACCAAACAGAAACTGCCGAAATTCAAACCGCTGTATAAACAGGTTCTGAGCG
ATCGTGAAAGCCTGAGCTTTTATGGTGAAGGTTATACCAGTGATGAAGAGGTTCTGGAAGTTTTTCGTAACACCCTG
AATAAAAACAGCGAGATCTTTAGCAGCATCAAAAAGCTTGAGAAACTGTTCAAAAACTTTGATGAGTATAGCAGCGC
AGGCATCTTTGTTAAAAATGGTCCGGCAATTAGCACCATCAGCAAAGATATTTTTGGCGAATGGAATGTGATCCGCG
ATAAATGGAATGCCGAATATGATGATATCCACCTGAAAAAAAAGGCCGTGGTGACCGAGAAATATGAAGATGATCGT
CGTAAAAGCTTCAAGAAAATTGGTAGCTTTAGCCTGGAACAGCTGCAAGAATATGCAGATGCAGATCTGAGCGTTGT
GGAAAAACTGAAAGAAATCATCATTCAGAAGGTGGACGAGATCTATAAAGTTTATGGTAGCAGCGAAAAACTGTTCG
ATGCAGATTTTGTTCTGGAAAAAAGCCTGAAAAAGAATGATGCCGTTGTGGCCATTATGAAAGATCTGCTGGATAGC
GTTAAGAGCTTCGAGAATTACATCAAAGCCTTTTTTGGTGAGGGCAAAGAAACCAATCGTGATGAAAGTTTCTATGG
CGATTTTGTGCTGGCCTATGATATTCTGCTGAAAGTGGACCATATTTATGATGCCATTCGCAATTATGTTACCCAGA
AACCGTATAGCAAAGACAAGTTCAAACTGTACTTTCAGAACCCGCAGTTTATGGGTGGTTGGGATAAAGATAAAGAA
ACCGATTATCGTGCCACCATCCTGCGTTATGGTAGTAAATACTATCTGGCCATCATGGACAAAAAATACGCAAAATG
CCTGCAGAAAATCGACAAAGATGATGTGAATGGCAACTATGAAAAAATCAACTACAAACTGCTGCCTGGTCCGAATA
AAATGCTGCCGAAAGTGTTCTTTAGCAAGAAATGGATGGCCTATTATAACCCGAGCGAGGATATTCAAAAGATCTAC
AAAAATGGCACCTTTAAAAAGGGCGACATGTTCAATCTGAACGATTGCCACAAACTGATCGATTTCTTCAAAGATTC
AATTTCGCGTTATCCGAAATGGTCCAATGCCTATGATTTTAACTTTAGCGAAACCGAAAAATACAAAGACATTGCCG
GTTTTTATCGCGAAGTGGAAGAACAGGGCTATAAAGTGAGCTTTGAAAGCGCAAGCAAAAAAGAGGTTGATAAGCTG
GTTGAAGAGGGCAAACTGTATATGTTCCAGATTTACAACAAAGATTTTAGCGACAAAAGCCATGGCACCCCGAATCT
GCATACCATGTACTTTAAACTGCTGTTCGACGAAAATAACCATGGTCAGATTCGTCTGAGCGGTGGTGCCGAACTGT
TTATGCGTCGTGCAAGTCTGAAAAAAGAAGAACTGGTTGTTCATCCGGCAAATAGCCCGATTGCAAACAAAAATCCG
GACAATCCGAAAAAAACCACGACACTGAGCTATGATGTGTATAAAGACAAACGTTTTAGCGAGGATCAGTATCTGCT
GCATATCCCGATTGCCATCAATAAATGCCCGAAAAACATCTTTAAGATCAACACCGAAGTTCGCGTGCTGCTGAAAC
ATGATGATAATCCGTATGTGATTGGCATTGATCGTGGTGAACGTAACCTGCTGTATATTGTTGTTGTTGATGGTAAA
GGCAACATCGTGGAACAGTATAGTCTGAACGAAATTATCAACAACTTTAACGGCATCCGCATCAAAACCGACTATCA
TAGCCTGCTGGACAAGAAAGAAAAAGAACGTTTTGAAGCACGTCAGAACTGGACCAGTATTGAAAACATCAAAGAAC
TGAAAGCCGGTTATATTAGCCAGGTGGTTCATAAAATCTGTGAGCTGGTAGAAAAATACGATGCAGTTATTGCACTG
GAAGATCTGAATAGCGGTTTCAAAAATAGCCGTGTGAAAGTCGAAAAACAGGTGTATCAGAAATTCGAGAAAATGCT
GATCGACAAACTGAACTACATGGTCGACAAAAAAAGCAATCCGTGTGCAACCGGTGGTGCACTGAAAGGTTATCAGA
TTACCAACAAATTTGAAAGCTTTAAAAGCATGAGCACCCAGAACGGCTTTATCTTCTATATTCCGGCATGGCTGACC
AGCAAAATTGATCCGAGCACCGGTTTTGTGAACCTGCTGAAAACAAAATATACCTCCATTGCCGACAGCAAGAAGTT
TATTAGCAGCTTTGATCGCATTATGTATGTTCCGGAAGAGGACCTGTTTGAATTCGCACTGGATTACAAAAATTTCA
GCCGTACCGATGCCGACTACATCAAAAAATGGAAACTGTACAGCTATGGTAACCGCATTCGCATTTTTCGCAACCCG
AAGAAAAACAATGTGTTCGATTGGGAAGAAGTTTGTCTGACCAGCGCATATAAAGAACTTTTCAACAAATACGGCAT
CAACTATCAGCAGGGTGATATTCGTGCACTGCTGTGTGAACAGAGCGATAAAGCGTTTTATAGCAGTTTTATGGCAC
TGATGAGCCTGATGCTGCAGATGCGTAATAGCATTACCGGTCGCACCGATGTGGATTTTCTGATTAGTCCGGTGAAA
AATTCCGATGGCATCTTTTATGATAGCCGCAATTACGAAGCACAAGAAAATGCAATTCTGCCGAAAAACGCAGATGC
AAATGGTGCATATAACATTGCACGTAAAGTTCTGTGGGCAATTGGCCAGTTTAAGAAAGCAGAAGATGAGAAGCTGG
ACAAAGTGAAAATTGCGATCAGCAATAAAGAGTGGCTGGAATACGCACAGACCAGCGTTAAACATGCGCCAGCGCCT
GCTCCTGCACCCGCTCCAGCTCCTGCCCCAGCTCCAGCGCCCGCTCCTGCGCCAGCTCCTGCACCTGCGATGGTTAG
CAAAGGTGAAGAACTGTTTACCGGCGTTGTGCCGATTCTGGTGGAACTGGATGGTGATGTGAATGGCCATAAATTTA
GCGTTAGCGGCGAAGGCGAAGGTGATGCGACCTATGGTAAACTGACCCTGAAATTTATTTGCACCACCGGTAAACTG
CCGGTTCCGTGGCCGACCCTGGTGACCACCCTGACCTATGGCGTTCAGTGCTTTAGCCGCTATCCGGATCATATGAA
ACAGCATGATTTCTTTAAAAGCGCGATGCCGGAAGGCTATGTGCAGGAACGTACCATTTTTTTCAAAGATGATGGCA
ACTATAAAACCCGTGCGGAAGTTAAATTTGAAGGCGATACCCTGGTGAACCGCATTGAACTGAAAGGTATTGATTTT
AAAGAAGATGGCAACATTCTGGGTCATAAACTGGAATATAATTACAACAGCCATAATGTGTATATTATGGCCGATAA
ACAGAAAAATGGCATCAAAGTGAACTTTAAAATCCGTCACAACATTGAAGATGGTAGCGTGCAGCTGGCGGATCATT
ATCAGCAGAATACCCCGATTGGTGATGGCCCGGTGCTGCTGCCGGATAATCATTATCTGAGCACCCAGAGCGCGCTG
AGCAAAGATCCGAATGAAAAACGTGATCATATGGTGCTGCTGGAATTTGTTACCGCCGCGGGCATTACCCTGGGTAT
GGATGAACTGTATAAA
(LbCas12a (E795L)-APAPAPAPAPAPAPAPAPAPAPAPAPAPA(SEQ ID NO: 23)-
eGFP chimera DNA sequence)
SEQ ID NO: 408
ATGAGCAAACTGGAAAAGTTCACCAACTGTTATAGCCTGAGCAAAACCCTGCGTTTTAAAGCAATTCCGGTTGGTAA
AACCCAAGAGAACATTGATAATAAACGCCTGCTGGTCGAAGATGAAAAACGCGCTGAAGATTATAAAGGCGTGAAAA
AACTGCTGGATCGCTATTATCTGAGCTTCATTAACGATGTGCTGCACAGCATTAAACTGAAGAACCTGAACAACTAT
ATCAGCCTGTTTCGTAAAAAAACCCGCACCGAAAAAGAAAACAAAGAGCTGGAAAACCTGGAAATCAATCTGCGTAA
AGAAATCGCCAAAGCGTTTAAAGGTAACGAGGGTTATAAAAGCCTGTTCAAGAAAGACATCATCGAAACCATTCTGC
CGGAATTTCTGGATGATAAAGATGAAATTGCCCTGGTGAATAGCTTTAATGGCTTTACCACCGCATTTACCGGCTTT
TTTGATAATCGCGAAAACATGTTCAGCGAAGAAGCAAAAAGCACCAGCATTGCATTTCGCTGCATTAATGAAAATCT
GACCCGCTACATTAGCAACATGGATATCTTTGAAAAAGTGGACGCGATCTTCGATAAACACGAAGTGCAAGAGATCA
AAGAGAAAATCCTGAACAGCGATTATGACGTCGAAGATTTTTTTGAAGGCGAGTTCTTTAACTTCGTTCTGACCCAA
GAAGGTATCGACGTTTATAACGCAATTATTGGTGGTTTTGTTACCGAAAGCGGTGAGAAAATCAAAGGCCTGAATGA
ATATATCAACCTGTATAACCAGAAAACCAAACAGAAACTGCCGAAATTCAAACCGCTGTATAAACAGGTTCTGAGCG
ATCGTGAAAGCCTGAGCTTTTATGGTGAAGGTTATACCAGTGATGAAGAGGTTCTGGAAGTTTTTCGTAACACCCTG
AATAAAAACAGCGAGATCTTTAGCAGCATCAAAAAGCTTGAGAAACTGTTCAAAAACTTTGATGAGTATAGCAGCGC
AGGCATCTTTGTTAAAAATGGTCCGGCAATTAGCACCATCAGCAAAGATATTTTTGGCGAATGGAATGTGATCCGCG
ATAAATGGAATGCCGAATATGATGATATCCACCTGAAAAAAAAGGCCGTGGTGACCGAGAAATATGAAGATGATCGT
CGTAAAAGCTTCAAGAAAATTGGTAGCTTTAGCCTGGAACAGCTGCAAGAATATGCAGATGCAGATCTGAGCGTTGT
GGAAAAACTGAAAGAAATCATCATTCAGAAGGTGGACGAGATCTATAAAGTTTATGGTAGCAGCGAAAAACTGTTCG
ATGCAGATTTTGTTCTGGAAAAAAGCCTGAAAAAGAATGATGCCGTTGTGGCCATTATGAAAGATCTGCTGGATAGC
GTTAAGAGCTTCGAGAATTACATCAAAGCCTTTTTTGGTGAGGGCAAAGAAACCAATCGTGATGAAAGTTTCTATGG
CGATTTTGTGCTGGCCTATGATATTCTGCTGAAAGTGGACCATATTTATGATGCCATTCGCAATTATGTTACCCAGA
AACCGTATAGCAAAGACAAGTTCAAACTGTACTTTCAGAACCCGCAGTTTATGGGTGGTTGGGATAAAGATAAAGAA
ACCGATTATCGTGCCACCATCCTGCGTTATGGTAGTAAATACTATCTGGCCATCATGGACAAAAAATACGCAAAATG
CCTGCAGAAAATCGACAAAGATGATGTGAATGGCAACTATGAAAAAATCAACTACAAACTGCTGCCTGGTCCGAATA
AAATGCTGCCGAAAGTGTTCTTTAGCAAGAAATGGATGGCCTATTATAACCCGAGCGAGGATATTCAAAAGATCTAC
AAAAATGGCACCTTTAAAAAGGGCGACATGTTCAATCTGAACGATTGCCACAAACTGATCGATTTCTTCAAAGATTC
AATTTCGCGTTATCCGAAATGGTCCAATGCCTATGATTTTAACTTTAGCGAAACCGAAAAATACAAAGACATTGCCG
GTTTTTATCGCGAAGTGGAAGAACAGGGCTATAAAGTGAGCTTTGAAAGCGCAAGCAAAAAAGAGGTTGATAAGCTG
GTTGAAGAGGGCAAACTGTATATGTTCCAGATTTACAACAAAGATTTTAGCGACAAAAGCCATGGCACCCCGAATCT
GCATACCATGTACTTTAAACTGCTGTTCGACGAAAATAACCATGGTCAGATTCGTCTGAGCGGTGGTGCCGAACTGT
TTATGCGTCGTGCAAGTCTGAAAAAAGAAGAACTGGTTGTTCATCCGGCAAATAGCCCGATTGCAAACAAAAATCCG
GACAATCCGAAAAAAACCACGACACTGAGCTATGATGTGTATAAAGACAAACGTTTTAGCGAGGATCAGTATCTGCT
GCATATCCCGATTGCCATCAATAAATGCCCGAAAAACATCTTTAAGATCAACACCGAAGTTCGCGTGCTGCTGAAAC
ATGATGATAATCCGTATGTGATTGGCATTGATCGTGGTGAACGTAACCTGCTGTATATTGTTGTTGTTGATGGTAAA
GGCAACATCGTGGAACAGTATAGTCTGAACGAAATTATCAACAACTTTAACGGCATCCGCATCAAAACCGACTATCA
TAGCCTGCTGGACAAGAAAGAAAAAGAACGTTTTGAAGCACGTCAGAACTGGACCAGTATTGAAAACATCAAAGAAC
TGAAAGCCGGTTATATTAGCCAGGTGGTTCATAAAATCTGTGAGCTGGTAGAAAAATACGATGCAGTTATTGCACTG
GAAGATCTGAATAGCGGTTTCAAAAATAGCCGTGTGAAAGTCGAAAAACAGGTGTATCAGAAATTCGAGAAAATGCT
GATCGACAAACTGAACTACATGGTCGACAAAAAAAGCAATCCGTGTGCAACCGGTGGTGCACTGAAAGGTTATCAGA
TTACCAACAAATTTGAAAGCTTTAAAAGCATGAGCACCCAGAACGGCTTTATCTTCTATATTCCGGCATGGCTGACC
AGCAAAATTGATCCGAGCACCGGTTTTGTGAACCTGCTGAAAACAAAATATACCTCCATTGCCGACAGCAAGAAGTT
TATTAGCAGCTTTGATCGCATTATGTATGTTCCGGAAGAGGACCTGTTTGAATTCGCACTGGATTACAAAAATTTCA
GCCGTACCGATGCCGACTACATCAAAAAATGGAAACTGTACAGCTATGGTAACCGCATTCGCATTTTTCGCAACCCG
AAGAAAAACAATGTGTTCGATTGGGAAGAAGTTTGTCTGACCAGCGCATATAAAGAACTTTTCAACAAATACGGCAT
CAACTATCAGCAGGGTGATATTCGTGCACTGCTGTGTGAACAGAGCGATAAAGCGTTTTATAGCAGTTTTATGGCAC
TGATGAGCCTGATGCTGCAGATGCGTAATAGCATTACCGGTCGCACCGATGTGGATTTTCTGATTAGTCCGGTGAAA
AATTCCGATGGCATCTTTTATGATAGCCGCAATTACGAAGCACAAGAAAATGCAATTCTGCCGAAAAACGCAGATGC
AAATGGTGCATATAACATTGCACGTAAAGTTCTGTGGGCAATTGGCCAGTTTAAGAAAGCAGAAGATGAGAAGCTGG
ACAAAGTGAAAATTGCGATCAGCAATAAAGAGTGGCTGGAATACGCACAGACCAGCGTTAAACATGCGCCAGCGCCT
GCTCCTGCACCCGCTCCAGCTCCTGCCCCAGCTCCAGCGCCCGCTCCTGCGCCAGCTCCTGCACCTGCTCCAGCGAT
GGTTAGCAAAGGTGAAGAACTGTTTACCGGCGTTGTGCCGATTCTGGTGGAACTGGATGGTGATGTGAATGGCCATA
AATTTAGCGTTAGCGGCGAAGGCGAAGGTGATGCGACCTATGGTAAACTGACCCTGAAATTTATTTGCACCACCGGT
AAACTGCCGGTTCCGTGGCCGACCCTGGTGACCACCCTGACCTATGGCGTTCAGTGCTTTAGCCGCTATCCGGATCA
TATGAAACAGCATGATTTCTTTAAAAGCGCGATGCCGGAAGGCTATGTGCAGGAACGTACCATTTTTTTCAAAGATG
ATGGCAACTATAAAACCCGTGCGGAAGTTAAATTTGAAGGCGATACCCTGGTGAACCGCATTGAACTGAAAGGTATT
GATTTTAAAGAAGATGGCAACATTCTGGGTCATAAACTGGAATATAATTACAACAGCCATAATGTGTATATTATGGC
CGATAAACAGAAAAATGGCATCAAAGTGAACTTTAAAATCCGTCACAACATTGAAGATGGTAGCGTGCAGCTGGCGG
ATCATTATCAGCAGAATACCCCGATTGGTGATGGCCCGGTGCTGCTGCCGGATAATCATTATCTGAGCACCCAGAGC
GCGCTGAGCAAAGATCCGAATGAAAAACGTGATCATATGGTGCTGCTGGAATTTGTTACCGCCGCGGGCATTACCCT
GGGTATGGATGAACTGTATAAA
(LbCas12a (E795L)-mCherry chimera DNA sequence)
SEQ ID NO: 409
ATGAGCAAACTGGAAAAGTTCACCAACTGTTATAGCCTGAGCAAAACCCTGCGTTTTAAAGCAATTCCGGTTGGTAA
AACCCAAGAGAACATTGATAATAAACGCCTGCTGGTCGAAGATGAAAAACGCGCTGAAGATTATAAAGGCGTGAAAA
AACTGCTGGATCGCTATTATCTGAGCTTCATTAACGATGTGCTGCACAGCATTAAACTGAAGAACCTGAACAACTAT
ATCAGCCTGTTTCGTAAAAAAACCCGCACCGAAAAAGAAAACAAAGAGCTGGAAAACCTGGAAATCAATCTGCGTAA
AGAAATCGCCAAAGCGTTTAAAGGTAACGAGGGTTATAAAAGCCTGTTCAAGAAAGACATCATCGAAACCATTCTGC
CGGAATTTCTGGATGATAAAGATGAAATTGCCCTGGTGAATAGCTTTAATGGCTTTACCACCGCATTTACCGGCTTT
TTTGATAATCGCGAAAACATGTTCAGCGAAGAAGCAAAAAGCACCAGCATTGCATTTCGCTGCATTAATGAAAATCT
GACCCGCTACATTAGCAACATGGATATCTTTGAAAAAGTGGACGCGATCTTCGATAAACACGAAGTGCAAGAGATCA
AAGAGAAAATCCTGAACAGCGATTATGACGTCGAAGATTTTTTTGAAGGCGAGTTCTTTAACTTCGTTCTGACCCAA
GAAGGTATCGACGTTTATAACGCAATTATTGGTGGTTTTGTTACCGAAAGCGGTGAGAAAATCAAAGGCCTGAATGA
ATATATCAACCTGTATAACCAGAAAACCAAACAGAAACTGCCGAAATTCAAACCGCTGTATAAACAGGTTCTGAGCG
ATCGTGAAAGCCTGAGCTTTTATGGTGAAGGTTATACCAGTGATGAAGAGGTTCTGGAAGTTTTTCGTAACACCCTG
AATAAAAACAGCGAGATCTTTAGCAGCATCAAAAAGCTTGAGAAACTGTTCAAAAACTTTGATGAGTATAGCAGCGC
AGGCATCTTTGTTAAAAATGGTCCGGCAATTAGCACCATCAGCAAAGATATTTTTGGCGAATGGAATGTGATCCGCG
ATAAATGGAATGCCGAATATGATGATATCCACCTGAAAAAAAAGGCCGTGGTGACCGAGAAATATGAAGATGATCGT
CGTAAAAGCTTCAAGAAAATTGGTAGCTTTAGCCTGGAACAGCTGCAAGAATATGCAGATGCAGATCTGAGCGTTGT
GGAAAAACTGAAAGAAATCATCATTCAGAAGGTGGACGAGATCTATAAAGTTTATGGTAGCAGCGAAAAACTGTTCG
ATGCAGATTTTGTTCTGGAAAAAAGCCTGAAAAAGAATGATGCCGTTGTGGCCATTATGAAAGATCTGCTGGATAGC
GTTAAGAGCTTCGAGAATTACATCAAAGCCTTTTTTGGTGAGGGCAAAGAAACCAATCGTGATGAAAGTTTCTATGG
CGATTTTGTGCTGGCCTATGATATTCTGCTGAAAGTGGACCATATTTATGATGCCATTCGCAATTATGTTACCCAGA
AACCGTATAGCAAAGACAAGTTCAAACTGTACTTTCAGAACCCGCAGTTTATGGGTGGTTGGGATAAAGATAAAGAA
ACCGATTATCGTGCCACCATCCTGCGTTATGGTAGTAAATACTATCTGGCCATCATGGACAAAAAATACGCAAAATG
CCTGCAGAAAATCGACAAAGATGATGTGAATGGCAACTATGAAAAAATCAACTACAAACTGCTGCCTGGTCCGAATA
AAATGCTGCCGAAAGTGTTCTTTAGCAAGAAATGGATGGCCTATTATAACCCGAGCGAGGATATTCAAAAGATCTAC
AAAAATGGCACCTTTAAAAAGGGCGACATGTTCAATCTGAACGATTGCCACAAACTGATCGATTTCTTCAAAGATTC
AATTTCGCGTTATCCGAAATGGTCCAATGCCTATGATTTTAACTTTAGCGAAACCGAAAAATACAAAGACATTGCCG
GTTTTTATCGCGAAGTGGAAGAACAGGGCTATAAAGTGAGCTTTGAAAGCGCAAGCAAAAAAGAGGTTGATAAGCTG
GTTGAAGAGGGCAAACTGTATATGTTCCAGATTTACAACAAAGATTTTAGCGACAAAAGCCATGGCACCCCGAATCT
GCATACCATGTACTTTAAACTGCTGTTCGACGAAAATAACCATGGTCAGATTCGTCTGAGCGGTGGTGCCGAACTGT
TTATGCGTCGTGCAAGTCTGAAAAAAGAAGAACTGGTTGTTCATCCGGCAAATAGCCCGATTGCAAACAAAAATCCG
GACAATCCGAAAAAAACCACGACACTGAGCTATGATGTGTATAAAGACAAACGTTTTAGCGAGGATCAGTATCTGCT
GCATATCCCGATTGCCATCAATAAATGCCCGAAAAACATCTTTAAGATCAACACCGAAGTTCGCGTGCTGCTGAAAC
ATGATGATAATCCGTATGTGATTGGCATTGATCGTGGTGAACGTAACCTGCTGTATATTGTTGTTGTTGATGGTAAA
GGCAACATCGTGGAACAGTATAGTCTGAACGAAATTATCAACAACTTTAACGGCATCCGCATCAAAACCGACTATCA
TAGCCTGCTGGACAAGAAAGAAAAAGAACGTTTTGAAGCACGTCAGAACTGGACCAGTATTGAAAACATCAAAGAAC
TGAAAGCCGGTTATATTAGCCAGGTGGTTCATAAAATCTGTGAGCTGGTAGAAAAATACGATGCAGTTATTGCACTG
GAAGATCTGAATAGCGGTTTCAAAAATAGCCGTGTGAAAGTCGAAAAACAGGTGTATCAGAAATTCGAGAAAATGCT
GATCGACAAACTGAACTACATGGTCGACAAAAAAAGCAATCCGTGTGCAACCGGTGGTGCACTGAAAGGTTATCAGA
TTACCAACAAATTTGAAAGCTTTAAAAGCATGAGCACCCAGAACGGCTTTATCTTCTATATTCCGGCATGGCTGACC
AGCAAAATTGATCCGAGCACCGGTTTTGTGAACCTGCTGAAAACAAAATATACCTCCATTGCCGACAGCAAGAAGTT
TATTAGCAGCTTTGATCGCATTATGTATGTTCCGGAAGAGGACCTGTTTGAATTCGCACTGGATTACAAAAATTTCA
GCCGTACCGATGCCGACTACATCAAAAAATGGAAACTGTACAGCTATGGTAACCGCATTCGCATTTTTCGCAACCCG
AAGAAAAACAATGTGTTCGATTGGGAAGAAGTTTGTCTGACCAGCGCATATAAAGAACTTTTCAACAAATACGGCAT
CAACTATCAGCAGGGTGATATTCGTGCACTGCTGTGTGAACAGAGCGATAAAGCGTTTTATAGCAGTTTTATGGCAC
TGATGAGCCTGATGCTGCAGATGCGTAATAGCATTACCGGTCGCACCGATGTGGATTTTCTGATTAGTCCGGTGAAA
AATTCCGATGGCATCTTTTATGATAGCCGCAATTACGAAGCACAAGAAAATGCAATTCTGCCGAAAAACGCAGATGC
AAATGGTGCATATAACATTGCACGTAAAGTTCTGTGGGCAATTGGCCAGTTTAAGAAAGCAGAAGATGAGAAGCTGG
ACAAAGTGAAAATTGCGATCAGCAATAAAGAGTGGCTGGAATACGCACAGACCAGCGTTAAACATATGGTGAGCAAA
GGTGAAGAGGATAATATGGCCATCATCAAAGAATTCATGCGCTTCAAAGTTCATATGGAAGGTAGCGTTAATGGCCA
CGAATTTGAAATTGAAGGTGAAGGCGAAGGTCGTCCGTATGAAGGCACCCAGACCGCAAAACTGAAAGTTACCAAAG
GTGGTCCGCTGCCGTTTGCATGGGATATTCTGAGTCCGCAGTTTATGTATGGTAGCAAAGCCTATGTTAAACATCCG
GCAGATATCCCGGATTATCTGAAACTGAGCTTTCCGGAAGGTTTTAAATGGGAACGTGTGATGAATTTTGAAGATGG
TGGTGTTGTTACCGTTACACAGGATAGCAGCCTGCAGGATGGTGAATTTATCTATAAAGTTAAACTGCGTGGCACGA
ATTTTCCGAGTGATGGTCCGGTTATGCAGAAAAAAACCATGGGTTGGGAAGCAAGCAGCGAACGTATGTATCCGGAA
GATGGCGCACTGAAAGGTGAAATTAAACAGCGTCTGAAGCTGAAAGATGGCGGTCATTATGATGCAGAAGTTAAAAC
CACCTACAAAGCCAAAAAACCGGTTCAGCTGCCTGGTGCATATAACGTTAACATTAAACTGGATATCACCAGCCACA
ACGAGGATTATACCATTGTTGAACAGTATGAACGTGCAGAAGGTCGCCATAGTACCGGTGGTATGGATGAACTGTAT
AAA
(LbCas12a (E795L)-GSAGSAAGSGEF(SEQ ID NO: 6)-mCherry chimera DNA sequence)
SEQ ID NO: 410
ATGAGCAAACTGGAAAAGTTCACCAACTGTTATAGCCTGAGCAAAACCCTGCGTTTTAAAGCAATTCCGGTTGGTAA
AACCCAAGAGAACATTGATAATAAACGCCTGCTGGTCGAAGATGAAAAACGCGCTGAAGATTATAAAGGCGTGAAAA
AACTGCTGGATCGCTATTATCTGAGCTTCATTAACGATGTGCTGCACAGCATTAAACTGAAGAACCTGAACAACTAT
ATCAGCCTGTTTCGTAAAAAAACCCGCACCGAAAAAGAAAACAAAGAGCTGGAAAACCTGGAAATCAATCTGCGTAA
AGAAATCGCCAAAGCGTTTAAAGGTAACGAGGGTTATAAAAGCCTGTTCAAGAAAGACATCATCGAAACCATTCTGC
CGGAATTTCTGGATGATAAAGATGAAATTGCCCTGGTGAATAGCTTTAATGGCTTTACCACCGCATTTACCGGCTTT
TTTGATAATCGCGAAAACATGTTCAGCGAAGAAGCAAAAAGCACCAGCATTGCATTTCGCTGCATTAATGAAAATCT
GACCCGCTACATTAGCAACATGGATATCTTTGAAAAAGTGGACGCGATCTTCGATAAACACGAAGTGCAAGAGATCA
AAGAGAAAATCCTGAACAGCGATTATGACGTCGAAGATTTTTTTGAAGGCGAGTTCTTTAACTTCGTTCTGACCCAA
GAAGGTATCGACGTTTATAACGCAATTATTGGTGGTTTTGTTACCGAAAGCGGTGAGAAAATCAAAGGCCTGAATGA
ATATATCAACCTGTATAACCAGAAAACCAAACAGAAACTGCCGAAATTCAAACCGCTGTATAAACAGGTTCTGAGCG
ATCGTGAAAGCCTGAGCTTTTATGGTGAAGGTTATACCAGTGATGAAGAGGTTCTGGAAGTTTTTCGTAACACCCTG
AATAAAAACAGCGAGATCTTTAGCAGCATCAAAAAGCTTGAGAAACTGTTCAAAAACTTTGATGAGTATAGCAGCGC
AGGCATCTTTGTTAAAAATGGTCCGGCAATTAGCACCATCAGCAAAGATATTTTTGGCGAATGGAATGTGATCCGCG
ATAAATGGAATGCCGAATATGATGATATCCACCTGAAAAAAAAGGCCGTGGTGACCGAGAAATATGAAGATGATCGT
CGTAAAAGCTTCAAGAAAATTGGTAGCTTTAGCCTGGAACAGCTGCAAGAATATGCAGATGCAGATCTGAGCGTTGT
GGAAAAACTGAAAGAAATCATCATTCAGAAGGTGGACGAGATCTATAAAGTTTATGGTAGCAGCGAAAAACTGTTCG
ATGCAGATTTTGTTCTGGAAAAAAGCCTGAAAAAGAATGATGCCGTTGTGGCCATTATGAAAGATCTGCTGGATAGC
GTTAAGAGCTTCGAGAATTACATCAAAGCCTTTTTTGGTGAGGGCAAAGAAACCAATCGTGATGAAAGTTTCTATGG
CGATTTTGTGCTGGCCTATGATATTCTGCTGAAAGTGGACCATATTTATGATGCCATTCGCAATTATGTTACCCAGA
AACCGTATAGCAAAGACAAGTTCAAACTGTACTTTCAGAACCCGCAGTTTATGGGTGGTTGGGATAAAGATAAAGAA
ACCGATTATCGTGCCACCATCCTGCGTTATGGTAGTAAATACTATCTGGCCATCATGGACAAAAAATACGCAAAATG
CCTGCAGAAAATCGACAAAGATGATGTGAATGGCAACTATGAAAAAATCAACTACAAACTGCTGCCTGGTCCGAATA
AAATGCTGCCGAAAGTGTTCTTTAGCAAGAAATGGATGGCCTATTATAACCCGAGCGAGGATATTCAAAAGATCTAC
AAAAATGGCACCTTTAAAAAGGGCGACATGTTCAATCTGAACGATTGCCACAAACTGATCGATTTCTTCAAAGATTC
AATTTCGCGTTATCCGAAATGGTCCAATGCCTATGATTTTAACTTTAGCGAAACCGAAAAATACAAAGACATTGCCG
GTTTTTATCGCGAAGTGGAAGAACAGGGCTATAAAGTGAGCTTTGAAAGCGCAAGCAAAAAAGAGGTTGATAAGCTG
GTTGAAGAGGGCAAACTGTATATGTTCCAGATTTACAACAAAGATTTTAGCGACAAAAGCCATGGCACCCCGAATCT
GCATACCATGTACTTTAAACTGCTGTTCGACGAAAATAACCATGGTCAGATTCGTCTGAGCGGTGGTGCCGAACTGT
TTATGCGTCGTGCAAGTCTGAAAAAAGAAGAACTGGTTGTTCATCCGGCAAATAGCCCGATTGCAAACAAAAATCCG
GACAATCCGAAAAAAACCACGACACTGAGCTATGATGTGTATAAAGACAAACGTTTTAGCGAGGATCAGTATCTGCT
GCATATCCCGATTGCCATCAATAAATGCCCGAAAAACATCTTTAAGATCAACACCGAAGTTCGCGTGCTGCTGAAAC
ATGATGATAATCCGTATGTGATTGGCATTGATCGTGGTGAACGTAACCTGCTGTATATTGTTGTTGTTGATGGTAAA
GGCAACATCGTGGAACAGTATAGTCTGAACGAAATTATCAACAACTTTAACGGCATCCGCATCAAAACCGACTATCA
TAGCCTGCTGGACAAGAAAGAAAAAGAACGTTTTGAAGCACGTCAGAACTGGACCAGTATTGAAAACATCAAAGAAC
TGAAAGCCGGTTATATTAGCCAGGTGGTTCATAAAATCTGTGAGCTGGTAGAAAAATACGATGCAGTTATTGCACTG
GAAGATCTGAATAGCGGTTTCAAAAATAGCCGTGTGAAAGTCGAAAAACAGGTGTATCAGAAATTCGAGAAAATGCT
GATCGACAAACTGAACTACATGGTCGACAAAAAAAGCAATCCGTGTGCAACCGGTGGTGCACTGAAAGGTTATCAGA
TTACCAACAAATTTGAAAGCTTTAAAAGCATGAGCACCCAGAACGGCTTTATCTTCTATATTCCGGCATGGCTGACC
AGCAAAATTGATCCGAGCACCGGTTTTGTGAACCTGCTGAAAACAAAATATACCTCCATTGCCGACAGCAAGAAGTT
TATTAGCAGCTTTGATCGCATTATGTATGTTCCGGAAGAGGACCTGTTTGAATTCGCACTGGATTACAAAAATTTCA
GCCGTACCGATGCCGACTACATCAAAAAATGGAAACTGTACAGCTATGGTAACCGCATTCGCATTTTTCGCAACCCG
AAGAAAAACAATGTGTTCGATTGGGAAGAAGTTTGTCTGACCAGCGCATATAAAGAACTTTTCAACAAATACGGCAT
CAACTATCAGCAGGGTGATATTCGTGCACTGCTGTGTGAACAGAGCGATAAAGCGTTTTATAGCAGTTTTATGGCAC
TGATGAGCCTGATGCTGCAGATGCGTAATAGCATTACCGGTCGCACCGATGTGGATTTTCTGATTAGTCCGGTGAAA
AATTCCGATGGCATCTTTTATGATAGCCGCAATTACGAAGCACAAGAAAATGCAATTCTGCCGAAAAACGCAGATGC
AAATGGTGCATATAACATTGCACGTAAAGTTCTGTGGGCAATTGGCCAGTTTAAGAAAGCAGAAGATGAGAAGCTGG
ACAAAGTGAAAATTGCGATCAGCAATAAAGAGTGGCTGGAATACGCACAGACCAGCGTTAAACATGGTAGCGCAGGT
AGTGCAGCAGGTAGCGGTGAATTTATGGTGAGCAAAGGTGAAGAGGATAATATGGCCATCATCAAAGAATTCATGCG
CTTCAAAGTTCATATGGAAGGTAGCGTTAATGGCCACGAATTTGAAATTGAAGGTGAAGGCGAAGGTCGTCCGTATG
AAGGCACCCAGACCGCAAAACTGAAAGTTACCAAAGGTGGTCCGCTGCCGTTTGCATGGGATATTCTGAGTCCGCAG
TTTATGTATGGTAGCAAAGCCTATGTTAAACATCCGGCAGATATCCCGGATTATCTGAAACTGAGCTTTCCGGAAGG
TTTTAAATGGGAACGTGTGATGAATTTTGAAGATGGTGGTGTTGTTACCGTTACACAGGATAGCAGCCTGCAGGATG
GTGAATTTATCTATAAAGTTAAACTGCGTGGCACGAATTTTCCGAGTGATGGTCCGGTTATGCAGAAAAAAACCATG
GGTTGGGAAGCAAGCAGCGAACGTATGTATCCGGAAGATGGCGCACTGAAAGGTGAAATTAAACAGCGTCTGAAGCT
GAAAGATGGCGGTCATTATGATGCAGAAGTTAAAACCACCTACAAAGCCAAAAAACCGGTTCAGCTGCCTGGTGCAT
ATAACGTTAACATTAAACTGGATATCACCAGCCACAACGAGGATTATACCATTGTTGAACAGTATGAACGTGCAGAA
GGTCGCCATAGTACCGGTGGTATGGATGAACTGTATAAA
(LbCas12a (E795L)-(GGGGS)₄-(SEQ ID NO: 7)mCherry chimera DNA sequence)
SEQ ID NO: 411
ATGAGCAAACTGGAAAAGTTCACCAACTGTTATAGCCTGAGCAAAACCCTGCGTTTTAAAGCAATTCCGGTTGGTAA
AACCCAAGAGAACATTGATAATAAACGCCTGCTGGTCGAAGATGAAAAACGCGCTGAAGATTATAAAGGCGTGAAAA
AACTGCTGGATCGCTATTATCTGAGCTTCATTAACGATGTGCTGCACAGCATTAAACTGAAGAACCTGAACAACTAT
ATCAGCCTGTTTCGTAAAAAAACCCGCACCGAAAAAGAAAACAAAGAGCTGGAAAACCTGGAAATCAATCTGCGTAA
AGAAATCGCCAAAGCGTTTAAAGGTAACGAGGGTTATAAAAGCCTGTTCAAGAAAGACATCATCGAAACCATTCTGC
CGGAATTTCTGGATGATAAAGATGAAATTGCCCTGGTGAATAGCTTTAATGGCTTTACCACCGCATTTACCGGCTTT
TTTGATAATCGCGAAAACATGTTCAGCGAAGAAGCAAAAAGCACCAGCATTGCATTTCGCTGCATTAATGAAAATCT
GACCCGCTACATTAGCAACATGGATATCTTTGAAAAAGTGGACGCGATCTTCGATAAACACGAAGTGCAAGAGATCA
AAGAGAAAATCCTGAACAGCGATTATGACGTCGAAGATTTTTTTGAAGGCGAGTTCTTTAACTTCGTTCTGACCCAA
GAAGGTATCGACGTTTATAACGCAATTATTGGTGGTTTTGTTACCGAAAGCGGTGAGAAAATCAAAGGCCTGAATGA
ATATATCAACCTGTATAACCAGAAAACCAAACAGAAACTGCCGAAATTCAAACCGCTGTATAAACAGGTTCTGAGCG
ATCGTGAAAGCCTGAGCTTTTATGGTGAAGGTTATACCAGTGATGAAGAGGTTCTGGAAGTTTTTCGTAACACCCTG
AATAAAAACAGCGAGATCTTTAGCAGCATCAAAAAGCTTGAGAAACTGTTCAAAAACTTTGATGAGTATAGCAGCGC
AGGCATCTTTGTTAAAAATGGTCCGGCAATTAGCACCATCAGCAAAGATATTTTTGGCGAATGGAATGTGATCCGCG
ATAAATGGAATGCCGAATATGATGATATCCACCTGAAAAAAAAGGCCGTGGTGACCGAGAAATATGAAGATGATCGT
CGTAAAAGCTTCAAGAAAATTGGTAGCTTTAGCCTGGAACAGCTGCAAGAATATGCAGATGCAGATCTGAGCGTTGT
GGAAAAACTGAAAGAAATCATCATTCAGAAGGTGGACGAGATCTATAAAGTTTATGGTAGCAGCGAAAAACTGTTCG
ATGCAGATTTTGTTCTGGAAAAAAGCCTGAAAAAGAATGATGCCGTTGTGGCCATTATGAAAGATCTGCTGGATAGC
GTTAAGAGCTTCGAGAATTACATCAAAGCCTTTTTTGGTGAGGGCAAAGAAACCAATCGTGATGAAAGTTTCTATGG
CGATTTTGTGCTGGCCTATGATATTCTGCTGAAAGTGGACCATATTTATGATGCCATTCGCAATTATGTTACCCAGA
AACCGTATAGCAAAGACAAGTTCAAACTGTACTTTCAGAACCCGCAGTTTATGGGTGGTTGGGATAAAGATAAAGAA
ACCGATTATCGTGCCACCATCCTGCGTTATGGTAGTAAATACTATCTGGCCATCATGGACAAAAAATACGCAAAATG
CCTGCAGAAAATCGACAAAGATGATGTGAATGGCAACTATGAAAAAATCAACTACAAACTGCTGCCTGGTCCGAATA
AAATGCTGCCGAAAGTGTTCTTTAGCAAGAAATGGATGGCCTATTATAACCCGAGCGAGGATATTCAAAAGATCTAC
AAAAATGGCACCTTTAAAAAGGGCGACATGTTCAATCTGAACGATTGCCACAAACTGATCGATTTCTTCAAAGATTC
AATTTCGCGTTATCCGAAATGGTCCAATGCCTATGATTTTAACTTTAGCGAAACCGAAAAATACAAAGACATTGCCG
GTTTTTATCGCGAAGTGGAAGAACAGGGCTATAAAGTGAGCTTTGAAAGCGCAAGCAAAAAAGAGGTTGATAAGCTG
GTTGAAGAGGGCAAACTGTATATGTTCCAGATTTACAACAAAGATTTTAGCGACAAAAGCCATGGCACCCCGAATCT
GCATACCATGTACTTTAAACTGCTGTTCGACGAAAATAACCATGGTCAGATTCGTCTGAGCGGTGGTGCCGAACTGT
TTATGCGTCGTGCAAGTCTGAAAAAAGAAGAACTGGTTGTTCATCCGGCAAATAGCCCGATTGCAAACAAAAATCCG
GACAATCCGAAAAAAACCACGACACTGAGCTATGATGTGTATAAAGACAAACGTTTTAGCGAGGATCAGTATCTGCT
GCATATCCCGATTGCCATCAATAAATGCCCGAAAAACATCTTTAAGATCAACACCGAAGTTCGCGTGCTGCTGAAAC
ATGATGATAATCCGTATGTGATTGGCATTGATCGTGGTGAACGTAACCTGCTGTATATTGTTGTTGTTGATGGTAAA
GGCAACATCGTGGAACAGTATAGTCTGAACGAAATTATCAACAACTTTAACGGCATCCGCATCAAAACCGACTATCA
TAGCCTGCTGGACAAGAAAGAAAAAGAACGTTTTGAAGCACGTCAGAACTGGACCAGTATTGAAAACATCAAAGAAC
TGAAAGCCGGTTATATTAGCCAGGTGGTTCATAAAATCTGTGAGCTGGTAGAAAAATACGATGCAGTTATTGCACTG
GAAGATCTGAATAGCGGTTTCAAAAATAGCCGTGTGAAAGTCGAAAAACAGGTGTATCAGAAATTCGAGAAAATGCT
GATCGACAAACTGAACTACATGGTCGACAAAAAAAGCAATCCGTGTGCAACCGGTGGTGCACTGAAAGGTTATCAGA
TTACCAACAAATTTGAAAGCTTTAAAAGCATGAGCACCCAGAACGGCTTTATCTTCTATATTCCGGCATGGCTGACC
AGCAAAATTGATCCGAGCACCGGTTTTGTGAACCTGCTGAAAACAAAATATACCTCCATTGCCGACAGCAAGAAGTT
TATTAGCAGCTTTGATCGCATTATGTATGTTCCGGAAGAGGACCTGTTTGAATTCGCACTGGATTACAAAAATTTCA
GCCGTACCGATGCCGACTACATCAAAAAATGGAAACTGTACAGCTATGGTAACCGCATTCGCATTTTTCGCAACCCG
AAGAAAAACAATGTGTTCGATTGGGAAGAAGTTTGTCTGACCAGCGCATATAAAGAACTTTTCAACAAATACGGCAT
CAACTATCAGCAGGGTGATATTCGTGCACTGCTGTGTGAACAGAGCGATAAAGCGTTTTATAGCAGTTTTATGGCAC
TGATGAGCCTGATGCTGCAGATGCGTAATAGCATTACCGGTCGCACCGATGTGGATTTTCTGATTAGTCCGGTGAAA
AATTCCGATGGCATCTTTTATGATAGCCGCAATTACGAAGCACAAGAAAATGCAATTCTGCCGAAAAACGCAGATGC
AAATGGTGCATATAACATTGCACGTAAAGTTCTGTGGGCAATTGGCCAGTTTAAGAAAGCAGAAGATGAGAAGCTGG
ACAAAGTGAAAATTGCGATCAGCAATAAAGAGTGGCTGGAATACGCACAGACCAGCGTTAAACATGGAGGCGGAGGA
TCAGGCGGTGGCGGAAGTGGTGGAGGTGGGTCGGGAGGTGGTGGTAGCATGGTGAGCAAAGGTGAAGAGGATAATAT
GGCCATCATCAAAGAATTCATGCGCTTCAAAGTTCATATGGAAGGTAGCGTTAATGGCCACGAATTTGAAATTGAAG
GTGAAGGCGAAGGTCGTCCGTATGAAGGCACCCAGACCGCAAAACTGAAAGTTACCAAAGGTGGTCCGCTGCCGTTT
GCATGGGATATTCTGAGTCCGCAGTTTATGTATGGTAGCAAAGCCTATGTTAAACATCCGGCAGATATCCCGGATTA
TCTGAAACTGAGCTTTCCGGAAGGTTTTAAATGGGAACGTGTGATGAATTTTGAAGATGGTGGTGTTGTTACCGTTA
CACAGGATAGCAGCCTGCAGGATGGTGAATTTATCTATAAAGTTAAACTGCGTGGCACGAATTTTCCGAGTGATGGT
CCGGTTATGCAGAAAAAAACCATGGGTTGGGAAGCAAGCAGCGAACGTATGTATCCGGAAGATGGCGCACTGAAAGG
TGAAATTAAACAGCGTCTGAAGCTGAAAGATGGCGGTCATTATGATGCAGAAGTTAAAACCACCTACAAAGCCAAAA
AACCGGTTCAGCTGCCTGGTGCATATAACGTTAACATTAAACTGGATATCACCAGCCACAACGAGGATTATACCATT
GTTGAACAGTATGAACGTGCAGAAGGTCGCCATAGTACCGGTGGTATGGATGAACTGTATAAA
(LbCas12a (E795L)-GGGGSEAAAKGGGGS(SEQ ID NO: 37)-
mCherry chimera DNA sequence)
SEQ ID NO: 412
ATGAGCAAACTGGAAAAGTTCACCAACTGTTATAGCCTGAGCAAAACCCTGCGTTTTAAAGCAATTCCGGTTGGTAA
AACCCAAGAGAACATTGATAATAAACGCCTGCTGGTCGAAGATGAAAAACGCGCTGAAGATTATAAAGGCGTGAAAA
AACTGCTGGATCGCTATTATCTGAGCTTCATTAACGATGTGCTGCACAGCATTAAACTGAAGAACCTGAACAACTAT
ATCAGCCTGTTTCGTAAAAAAACCCGCACCGAAAAAGAAAACAAAGAGCTGGAAAACCTGGAAATCAATCTGCGTAA
AGAAATCGCCAAAGCGTTTAAAGGTAACGAGGGTTATAAAAGCCTGTTCAAGAAAGACATCATCGAAACCATTCTGC
CGGAATTTCTGGATGATAAAGATGAAATTGCCCTGGTGAATAGCTTTAATGGCTTTACCACCGCATTTACCGGCTTT
TTTGATAATCGCGAAAACATGTTCAGCGAAGAAGCAAAAAGCACCAGCATTGCATTTCGCTGCATTAATGAAAATCT
GACCCGCTACATTAGCAACATGGATATCTTTGAAAAAGTGGACGCGATCTTCGATAAACACGAAGTGCAAGAGATCA
AAGAGAAAATCCTGAACAGCGATTATGACGTCGAAGATTTTTTTGAAGGCGAGTTCTTTAACTTCGTTCTGACCCAA
GAAGGTATCGACGTTTATAACGCAATTATTGGTGGTTTTGTTACCGAAAGCGGTGAGAAAATCAAAGGCCTGAATGA
ATATATCAACCTGTATAACCAGAAAACCAAACAGAAACTGCCGAAATTCAAACCGCTGTATAAACAGGTTCTGAGCG
ATCGTGAAAGCCTGAGCTTTTATGGTGAAGGTTATACCAGTGATGAAGAGGTTCTGGAAGTTTTTCGTAACACCCTG
AATAAAAACAGCGAGATCTTTAGCAGCATCAAAAAGCTTGAGAAACTGTTCAAAAACTTTGATGAGTATAGCAGCGC
AGGCATCTTTGTTAAAAATGGTCCGGCAATTAGCACCATCAGCAAAGATATTTTTGGCGAATGGAATGTGATCCGCG
ATAAATGGAATGCCGAATATGATGATATCCACCTGAAAAAAAAGGCCGTGGTGACCGAGAAATATGAAGATGATCGT
CGTAAAAGCTTCAAGAAAATTGGTAGCTTTAGCCTGGAACAGCTGCAAGAATATGCAGATGCAGATCTGAGCGTTGT
GGAAAAACTGAAAGAAATCATCATTCAGAAGGTGGACGAGATCTATAAAGTTTATGGTAGCAGCGAAAAACTGTTCG
ATGCAGATTTTGTTCTGGAAAAAAGCCTGAAAAAGAATGATGCCGTTGTGGCCATTATGAAAGATCTGCTGGATAGC
GTTAAGAGCTTCGAGAATTACATCAAAGCCTTTTTTGGTGAGGGCAAAGAAACCAATCGTGATGAAAGTTTCTATGG
CGATTTTGTGCTGGCCTATGATATTCTGCTGAAAGTGGACCATATTTATGATGCCATTCGCAATTATGTTACCCAGA
AACCGTATAGCAAAGACAAGTTCAAACTGTACTTTCAGAACCCGCAGTTTATGGGTGGTTGGGATAAAGATAAAGAA
ACCGATTATCGTGCCACCATCCTGCGTTATGGTAGTAAATACTATCTGGCCATCATGGACAAAAAATACGCAAAATG
CCTGCAGAAAATCGACAAAGATGATGTGAATGGCAACTATGAAAAAATCAACTACAAACTGCTGCCTGGTCCGAATA
AAATGCTGCCGAAAGTGTTCTTTAGCAAGAAATGGATGGCCTATTATAACCCGAGCGAGGATATTCAAAAGATCTAC
AAAAATGGCACCTTTAAAAAGGGCGACATGTTCAATCTGAACGATTGCCACAAACTGATCGATTTCTTCAAAGATTC
AATTTCGCGTTATCCGAAATGGTCCAATGCCTATGATTTTAACTTTAGCGAAACCGAAAAATACAAAGACATTGCCG
GTTTTTATCGCGAAGTGGAAGAACAGGGCTATAAAGTGAGCTTTGAAAGCGCAAGCAAAAAAGAGGTTGATAAGCTG
GTTGAAGAGGGCAAACTGTATATGTTCCAGATTTACAACAAAGATTTTAGCGACAAAAGCCATGGCACCCCGAATCT
GCATACCATGTACTTTAAACTGCTGTTCGACGAAAATAACCATGGTCAGATTCGTCTGAGCGGTGGTGCCGAACTGT
TTATGCGTCGTGCAAGTCTGAAAAAAGAAGAACTGGTTGTTCATCCGGCAAATAGCCCGATTGCAAACAAAAATCCG
GACAATCCGAAAAAAACCACGACACTGAGCTATGATGTGTATAAAGACAAACGTTTTAGCGAGGATCAGTATCTGCT
GCATATCCCGATTGCCATCAATAAATGCCCGAAAAACATCTTTAAGATCAACACCGAAGTTCGCGTGCTGCTGAAAC
ATGATGATAATCCGTATGTGATTGGCATTGATCGTGGTGAACGTAACCTGCTGTATATTGTTGTTGTTGATGGTAAA
GGCAACATCGTGGAACAGTATAGTCTGAACGAAATTATCAACAACTTTAACGGCATCCGCATCAAAACCGACTATCA
TAGCCTGCTGGACAAGAAAGAAAAAGAACGTTTTGAAGCACGTCAGAACTGGACCAGTATTGAAAACATCAAAGAAC
TGAAAGCCGGTTATATTAGCCAGGTGGTTCATAAAATCTGTGAGCTGGTAGAAAAATACGATGCAGTTATTGCACTG
GAAGATCTGAATAGCGGTTTCAAAAATAGCCGTGTGAAAGTCGAAAAACAGGTGTATCAGAAATTCGAGAAAATGCT
GATCGACAAACTGAACTACATGGTCGACAAAAAAAGCAATCCGTGTGCAACCGGTGGTGCACTGAAAGGTTATCAGA
TTACCAACAAATTTGAAAGCTTTAAAAGCATGAGCACCCAGAACGGCTTTATCTTCTATATTCCGGCATGGCTGACC
AGCAAAATTGATCCGAGCACCGGTTTTGTGAACCTGCTGAAAACAAAATATACCTCCATTGCCGACAGCAAGAAGTT
TATTAGCAGCTTTGATCGCATTATGTATGTTCCGGAAGAGGACCTGTTTGAATTCGCACTGGATTACAAAAATTTCA
GCCGTACCGATGCCGACTACATCAAAAAATGGAAACTGTACAGCTATGGTAACCGCATTCGCATTTTTCGCAACCCG
AAGAAAAACAATGTGTTCGATTGGGAAGAAGTTTGTCTGACCAGCGCATATAAAGAACTTTTCAACAAATACGGCAT
CAACTATCAGCAGGGTGATATTCGTGCACTGCTGTGTGAACAGAGCGATAAAGCGTTTTATAGCAGTTTTATGGCAC
TGATGAGCCTGATGCTGCAGATGCGTAATAGCATTACCGGTCGCACCGATGTGGATTTTCTGATTAGTCCGGTGAAA
AATTCCGATGGCATCTTTTATGATAGCCGCAATTACGAAGCACAAGAAAATGCAATTCTGCCGAAAAACGCAGATGC
AAATGGTGCATATAACATTGCACGTAAAGTTCTGTGGGCAATTGGCCAGTTTAAGAAAGCAGAAGATGAGAAGCTGG
ACAAAGTGAAAATTGCGATCAGCAATAAAGAGTGGCTGGAATACGCACAGACCAGCGTTAAACATGGAGGCGGAGGG
TCGGAAGCGGCAGCAAAAGGAGGCGGAGGAAGTATGGTGAGCAAAGGTGAAGAGGATAATATGGCCATCATCAAAGA
ATTCATGCGCTTCAAAGTTCATATGGAAGGTAGCGTTAATGGCCACGAATTTGAAATTGAAGGTGAAGGCGAAGGTC
GTCCGTATGAAGGCACCCAGACCGCAAAACTGAAAGTTACCAAAGGTGGTCCGCTGCCGTTTGCATGGGATATTCTG
AGTCCGCAGTTTATGTATGGTAGCAAAGCCTATGTTAAACATCCGGCAGATATCCCGGATTATCTGAAACTGAGCTT
TCCGGAAGGTTTTAAATGGGAACGTGTGATGAATTTTGAAGATGGTGGTGTTGTTACCGTTACACAGGATAGCAGCC
TGCAGGATGGTGAATTTATCTATAAAGTTAAACTGCGTGGCACGAATTTTCCGAGTGATGGTCCGGTTATGCAGAAA
AAAACCATGGGTTGGGAAGCAAGCAGCGAACGTATGTATCCGGAAGATGGCGCACTGAAAGGTGAAATTAAACAGCG
TCTGAAGCTGAAAGATGGCGGTCATTATGATGCAGAAGTTAAAACCACCTACAAAGCCAAAAAACCGGTTCAGCTGC
CTGGTGCATATAACGTTAACATTAAACTGGATATCACCAGCCACAACGAGGATTATACCATTGTTGAACAGTATGAA
CGTGCAGAAGGTCGCCATAGTACCGGTGGTATGGATGAACTGTATAAA
(LbCas12a (E795L)-A(EAAAK)₄A-(SEQ ID NO: 8)mCherry chimera DNA sequence)
SEQ ID NO: 413
ATGAGCAAACTGGAAAAGTTCACCAACTGTTATAGCCTGAGCAAAACCCTGCGTTTTAAAGCAATTCCGGTTGGTAA
AACCCAAGAGAACATTGATAATAAACGCCTGCTGGTCGAAGATGAAAAACGCGCTGAAGATTATAAAGGCGTGAAAA
AACTGCTGGATCGCTATTATCTGAGCTTCATTAACGATGTGCTGCACAGCATTAAACTGAAGAACCTGAACAACTAT
ATCAGCCTGTTTCGTAAAAAAACCCGCACCGAAAAAGAAAACAAAGAGCTGGAAAACCTGGAAATCAATCTGCGTAA
AGAAATCGCCAAAGCGTTTAAAGGTAACGAGGGTTATAAAAGCCTGTTCAAGAAAGACATCATCGAAACCATTCTGC
CGGAATTTCTGGATGATAAAGATGAAATTGCCCTGGTGAATAGCTTTAATGGCTTTACCACCGCATTTACCGGCTTT
TTTGATAATCGCGAAAACATGTTCAGCGAAGAAGCAAAAAGCACCAGCATTGCATTTCGCTGCATTAATGAAAATCT
GACCCGCTACATTAGCAACATGGATATCTTTGAAAAAGTGGACGCGATCTTCGATAAACACGAAGTGCAAGAGATCA
AAGAGAAAATCCTGAACAGCGATTATGACGTCGAAGATTTTTTTGAAGGCGAGTTCTTTAACTTCGTTCTGACCCAA
GAAGGTATCGACGTTTATAACGCAATTATTGGTGGTTTTGTTACCGAAAGCGGTGAGAAAATCAAAGGCCTGAATGA
ATATATCAACCTGTATAACCAGAAAACCAAACAGAAACTGCCGAAATTCAAACCGCTGTATAAACAGGTTCTGAGCG
ATCGTGAAAGCCTGAGCTTTTATGGTGAAGGTTATACCAGTGATGAAGAGGTTCTGGAAGTTTTTCGTAACACCCTG
AATAAAAACAGCGAGATCTTTAGCAGCATCAAAAAGCTTGAGAAACTGTTCAAAAACTTTGATGAGTATAGCAGCGC
AGGCATCTTTGTTAAAAATGGTCCGGCAATTAGCACCATCAGCAAAGATATTTTTGGCGAATGGAATGTGATCCGCG
ATAAATGGAATGCCGAATATGATGATATCCACCTGAAAAAAAAGGCCGTGGTGACCGAGAAATATGAAGATGATCGT
CGTAAAAGCTTCAAGAAAATTGGTAGCTTTAGCCTGGAACAGCTGCAAGAATATGCAGATGCAGATCTGAGCGTTGT
GGAAAAACTGAAAGAAATCATCATTCAGAAGGTGGACGAGATCTATAAAGTTTATGGTAGCAGCGAAAAACTGTTCG
ATGCAGATTTTGTTCTGGAAAAAAGCCTGAAAAAGAATGATGCCGTTGTGGCCATTATGAAAGATCTGCTGGATAGC
GTTAAGAGCTTCGAGAATTACATCAAAGCCTTTTTTGGTGAGGGCAAAGAAACCAATCGTGATGAAAGTTTCTATGG
CGATTTTGTGCTGGCCTATGATATTCTGCTGAAAGTGGACCATATTTATGATGCCATTCGCAATTATGTTACCCAGA
AACCGTATAGCAAAGACAAGTTCAAACTGTACTTTCAGAACCCGCAGTTTATGGGTGGTTGGGATAAAGATAAAGAA
ACCGATTATCGTGCCACCATCCTGCGTTATGGTAGTAAATACTATCTGGCCATCATGGACAAAAAATACGCAAAATG
CCTGCAGAAAATCGACAAAGATGATGTGAATGGCAACTATGAAAAAATCAACTACAAACTGCTGCCTGGTCCGAATA
AAATGCTGCCGAAAGTGTTCTTTAGCAAGAAATGGATGGCCTATTATAACCCGAGCGAGGATATTCAAAAGATCTAC
AAAAATGGCACCTTTAAAAAGGGCGACATGTTCAATCTGAACGATTGCCACAAACTGATCGATTTCTTCAAAGATTC
AATTTCGCGTTATCCGAAATGGTCCAATGCCTATGATTTTAACTTTAGCGAAACCGAAAAATACAAAGACATTGCCG
GTTTTTATCGCGAAGTGGAAGAACAGGGCTATAAAGTGAGCTTTGAAAGCGCAAGCAAAAAAGAGGTTGATAAGCTG
GTTGAAGAGGGCAAACTGTATATGTTCCAGATTTACAACAAAGATTTTAGCGACAAAAGCCATGGCACCCCGAATCT
GCATACCATGTACTTTAAACTGCTGTTCGACGAAAATAACCATGGTCAGATTCGTCTGAGCGGTGGTGCCGAACTGT
TTATGCGTCGTGCAAGTCTGAAAAAAGAAGAACTGGTTGTTCATCCGGCAAATAGCCCGATTGCAAACAAAAATCCG
GACAATCCGAAAAAAACCACGACACTGAGCTATGATGTGTATAAAGACAAACGTTTTAGCGAGGATCAGTATCTGCT
GCATATCCCGATTGCCATCAATAAATGCCCGAAAAACATCTTTAAGATCAACACCGAAGTTCGCGTGCTGCTGAAAC
ATGATGATAATCCGTATGTGATTGGCATTGATCGTGGTGAACGTAACCTGCTGTATATTGTTGTTGTTGATGGTAAA
GGCAACATCGTGGAACAGTATAGTCTGAACGAAATTATCAACAACTTTAACGGCATCCGCATCAAAACCGACTATCA
TAGCCTGCTGGACAAGAAAGAAAAAGAACGTTTTGAAGCACGTCAGAACTGGACCAGTATTGAAAACATCAAAGAAC
TGAAAGCCGGTTATATTAGCCAGGTGGTTCATAAAATCTGTGAGCTGGTAGAAAAATACGATGCAGTTATTGCACTG
GAAGATCTGAATAGCGGTTTCAAAAATAGCCGTGTGAAAGTCGAAAAACAGGTGTATCAGAAATTCGAGAAAATGCT
GATCGACAAACTGAACTACATGGTCGACAAAAAAAGCAATCCGTGTGCAACCGGTGGTGCACTGAAAGGTTATCAGA
TTACCAACAAATTTGAAAGCTTTAAAAGCATGAGCACCCAGAACGGCTTTATCTTCTATATTCCGGCATGGCTGACC
AGCAAAATTGATCCGAGCACCGGTTTTGTGAACCTGCTGAAAACAAAATATACCTCCATTGCCGACAGCAAGAAGTT
TATTAGCAGCTTTGATCGCATTATGTATGTTCCGGAAGAGGACCTGTTTGAATTCGCACTGGATTACAAAAATTTCA
GCCGTACCGATGCCGACTACATCAAAAAATGGAAACTGTACAGCTATGGTAACCGCATTCGCATTTTTCGCAACCCG
AAGAAAAACAATGTGTTCGATTGGGAAGAAGTTTGTCTGACCAGCGCATATAAAGAACTTTTCAACAAATACGGCAT
CAACTATCAGCAGGGTGATATTCGTGCACTGCTGTGTGAACAGAGCGATAAAGCGTTTTATAGCAGTTTTATGGCAC
TGATGAGCCTGATGCTGCAGATGCGTAATAGCATTACCGGTCGCACCGATGTGGATTTTCTGATTAGTCCGGTGAAA
AATTCCGATGGCATCTTTTATGATAGCCGCAATTACGAAGCACAAGAAAATGCAATTCTGCCGAAAAACGCAGATGC
AAATGGTGCATATAACATTGCACGTAAAGTTCTGTGGGCAATTGGCCAGTTTAAGAAAGCAGAAGATGAGAAGCTGG
ACAAAGTGAAAATTGCGATCAGCAATAAAGAGTGGCTGGAATACGCACAGACCAGCGTTAAACATGCTGAGGCCGCA
GCAAAAGAGGCTGCCGCTAAGGAGGCTGCTGCAAAAGAAGCAGCAGCGAAAGCTATGGTGAGCAAAGGTGAAGAGGA
TAATATGGCCATCATCAAAGAATTCATGCGCTTCAAAGTTCATATGGAAGGTAGCGTTAATGGCCACGAATTTGAAA
TTGAAGGTGAAGGCGAAGGTCGTCCGTATGAAGGCACCCAGACCGCAAAACTGAAAGTTACCAAAGGTGGTCCGCTG
CCGTTTGCATGGGATATTCTGAGTCCGCAGTTTATGTATGGTAGCAAAGCCTATGTTAAACATCCGGCAGATATCCC
GGATTATCTGAAACTGAGCTTTCCGGAAGGTTTTAAATGGGAACGTGTGATGAATTTTGAAGATGGTGGTGTTGTTA
CCGTTACACAGGATAGCAGCCTGCAGGATGGTGAATTTATCTATAAAGTTAAACTGCGTGGCACGAATTTTCCGAGT
GATGGTCCGGTTATGCAGAAAAAAACCATGGGTTGGGAAGCAAGCAGCGAACGTATGTATCCGGAAGATGGCGCACT
GAAAGGTGAAATTAAACAGCGTCTGAAGCTGAAAGATGGCGGTCATTATGATGCAGAAGTTAAAACCACCTACAAAG
CCAAAAAACCGGTTCAGCTGCCTGGTGCATATAACGTTAACATTAAACTGGATATCACCAGCCACAACGAGGATTAT
ACCATTGTTGAACAGTATGAACGTGCAGAAGGTCGCCATAGTACCGGTGGTATGGATGAACTGTATAAA
(LbCas12a (E795L)-A(EAAAK)₄ALEA(EAAAK)₄A(SEQ ID NO: 9)-
mCherry chimera DNA sequence)
SEQ ID NO: 414
ATGAGCAAACTGGAAAAGTTCACCAACTGTTATAGCCTGAGCAAAACCCTGCGTTTTAAAGCAATTCCGGTTGGTAA
AACCCAAGAGAACATTGATAATAAACGCCTGCTGGTCGAAGATGAAAAACGCGCTGAAGATTATAAAGGCGTGAAAA
AACTGCTGGATCGCTATTATCTGAGCTTCATTAACGATGTGCTGCACAGCATTAAACTGAAGAACCTGAACAACTAT
ATCAGCCTGTTTCGTAAAAAAACCCGCACCGAAAAAGAAAACAAAGAGCTGGAAAACCTGGAAATCAATCTGCGTAA
AGAAATCGCCAAAGCGTTTAAAGGTAACGAGGGTTATAAAAGCCTGTTCAAGAAAGACATCATCGAAACCATTCTGC
CGGAATTTCTGGATGATAAAGATGAAATTGCCCTGGTGAATAGCTTTAATGGCTTTACCACCGCATTTACCGGCTTT
TTTGATAATCGCGAAAACATGTTCAGCGAAGAAGCAAAAAGCACCAGCATTGCATTTCGCTGCATTAATGAAAATCT
GACCCGCTACATTAGCAACATGGATATCTTTGAAAAAGTGGACGCGATCTTCGATAAACACGAAGTGCAAGAGATCA
AAGAGAAAATCCTGAACAGCGATTATGACGTCGAAGATTTTTTTGAAGGCGAGTTCTTTAACTTCGTTCTGACCCAA
GAAGGTATCGACGTTTATAACGCAATTATTGGTGGTTTTGTTACCGAAAGCGGTGAGAAAATCAAAGGCCTGAATGA
ATATATCAACCTGTATAACCAGAAAACCAAACAGAAACTGCCGAAATTCAAACCGCTGTATAAACAGGTTCTGAGCG
ATCGTGAAAGCCTGAGCTTTTATGGTGAAGGTTATACCAGTGATGAAGAGGTTCTGGAAGTTTTTCGTAACACCCTG
AATAAAAACAGCGAGATCTTTAGCAGCATCAAAAAGCTTGAGAAACTGTTCAAAAACTTTGATGAGTATAGCAGCGC
AGGCATCTTTGTTAAAAATGGTCCGGCAATTAGCACCATCAGCAAAGATATTTTTGGCGAATGGAATGTGATCCGCG
ATAAATGGAATGCCGAATATGATGATATCCACCTGAAAAAAAAGGCCGTGGTGACCGAGAAATATGAAGATGATCGT
CGTAAAAGCTTCAAGAAAATTGGTAGCTTTAGCCTGGAACAGCTGCAAGAATATGCAGATGCAGATCTGAGCGTTGT
GGAAAAACTGAAAGAAATCATCATTCAGAAGGTGGACGAGATCTATAAAGTTTATGGTAGCAGCGAAAAACTGTTCG
ATGCAGATTTTGTTCTGGAAAAAAGCCTGAAAAAGAATGATGCCGTTGTGGCCATTATGAAAGATCTGCTGGATAGC
GTTAAGAGCTTCGAGAATTACATCAAAGCCTTTTTTGGTGAGGGCAAAGAAACCAATCGTGATGAAAGTTTCTATGG
CGATTTTGTGCTGGCCTATGATATTCTGCTGAAAGTGGACCATATTTATGATGCCATTCGCAATTATGTTACCCAGA
AACCGTATAGCAAAGACAAGTTCAAACTGTACTTTCAGAACCCGCAGTTTATGGGTGGTTGGGATAAAGATAAAGAA
ACCGATTATCGTGCCACCATCCTGCGTTATGGTAGTAAATACTATCTGGCCATCATGGACAAAAAATACGCAAAATG
CCTGCAGAAAATCGACAAAGATGATGTGAATGGCAACTATGAAAAAATCAACTACAAACTGCTGCCTGGTCCGAATA
AAATGCTGCCGAAAGTGTTCTTTAGCAAGAAATGGATGGCCTATTATAACCCGAGCGAGGATATTCAAAAGATCTAC
AAAAATGGCACCTTTAAAAAGGGCGACATGTTCAATCTGAACGATTGCCACAAACTGATCGATTTCTTCAAAGATTC
AATTTCGCGTTATCCGAAATGGTCCAATGCCTATGATTTTAACTTTAGCGAAACCGAAAAATACAAAGACATTGCCG
GTTTTTATCGCGAAGTGGAAGAACAGGGCTATAAAGTGAGCTTTGAAAGCGCAAGCAAAAAAGAGGTTGATAAGCTG
GTTGAAGAGGGCAAACTGTATATGTTCCAGATTTACAACAAAGATTTTAGCGACAAAAGCCATGGCACCCCGAATCT
GCATACCATGTACTTTAAACTGCTGTTCGACGAAAATAACCATGGTCAGATTCGTCTGAGCGGTGGTGCCGAACTGT
TTATGCGTCGTGCAAGTCTGAAAAAAGAAGAACTGGTTGTTCATCCGGCAAATAGCCCGATTGCAAACAAAAATCCG
GACAATCCGAAAAAAACCACGACACTGAGCTATGATGTGTATAAAGACAAACGTTTTAGCGAGGATCAGTATCTGCT
GCATATCCCGATTGCCATCAATAAATGCCCGAAAAACATCTTTAAGATCAACACCGAAGTTCGCGTGCTGCTGAAAC
ATGATGATAATCCGTATGTGATTGGCATTGATCGTGGTGAACGTAACCTGCTGTATATTGTTGTTGTTGATGGTAAA
GGCAACATCGTGGAACAGTATAGTCTGAACGAAATTATCAACAACTTTAACGGCATCCGCATCAAAACCGACTATCA
TAGCCTGCTGGACAAGAAAGAAAAAGAACGTTTTGAAGCACGTCAGAACTGGACCAGTATTGAAAACATCAAAGAAC
TGAAAGCCGGTTATATTAGCCAGGTGGTTCATAAAATCTGTGAGCTGGTAGAAAAATACGATGCAGTTATTGCACTG
GAAGATCTGAATAGCGGTTTCAAAAATAGCCGTGTGAAAGTCGAAAAACAGGTGTATCAGAAATTCGAGAAAATGCT
GATCGACAAACTGAACTACATGGTCGACAAAAAAAGCAATCCGTGTGCAACCGGTGGTGCACTGAAAGGTTATCAGA
TTACCAACAAATTTGAAAGCTTTAAAAGCATGAGCACCCAGAACGGCTTTATCTTCTATATTCCGGCATGGCTGACC
AGCAAAATTGATCCGAGCACCGGTTTTGTGAACCTGCTGAAAACAAAATATACCTCCATTGCCGACAGCAAGAAGTT
TATTAGCAGCTTTGATCGCATTATGTATGTTCCGGAAGAGGACCTGTTTGAATTCGCACTGGATTACAAAAATTTCA
GCCGTACCGATGCCGACTACATCAAAAAATGGAAACTGTACAGCTATGGTAACCGCATTCGCATTTTTCGCAACCCG
AAGAAAAACAATGTGTTCGATTGGGAAGAAGTTTGTCTGACCAGCGCATATAAAGAACTTTTCAACAAATACGGCAT
CAACTATCAGCAGGGTGATATTCGTGCACTGCTGTGTGAACAGAGCGATAAAGCGTTTTATAGCAGTTTTATGGCAC
TGATGAGCCTGATGCTGCAGATGCGTAATAGCATTACCGGTCGCACCGATGTGGATTTTCTGATTAGTCCGGTGAAA
AATTCCGATGGCATCTTTTATGATAGCCGCAATTACGAAGCACAAGAAAATGCAATTCTGCCGAAAAACGCAGATGC
AAATGGTGCATATAACATTGCACGTAAAGTTCTGTGGGCAATTGGCCAGTTTAAGAAAGCAGAAGATGAGAAGCTGG
ACAAAGTGAAAATTGCGATCAGCAATAAAGAGTGGCTGGAATACGCACAGACCAGCGTTAAACATGCCGAAGCAGCA
GCCAAAGAAGCTGCCGCAAAGGAGGCGGCAGCTAAAGAAGCGGCCGCTAAGGCATTGGAAGCGGAGGCGGCTGCCAA
GGAGGCTGCGGCGAAAGAAGCTGCGGCCAAAGAAGCGGCTGCAAAAGCGATGGTGAGCAAAGGTGAAGAGGATAATA
TGGCCATCATCAAAGAATTCATGCGCTTCAAAGTTCATATGGAAGGTAGCGTTAATGGCCACGAATTTGAAATTGAA
GGTGAAGGCGAAGGTCGTCCGTATGAAGGCACCCAGACCGCAAAACTGAAAGTTACCAAAGGTGGTCCGCTGCCGTT
TGCATGGGATATTCTGAGTCCGCAGTTTATGTATGGTAGCAAAGCCTATGTTAAACATCCGGCAGATATCCCGGATT
ATCTGAAACTGAGCTTTCCGGAAGGTTTTAAATGGGAACGTGTGATGAATTTTGAAGATGGTGGTGTTGTTACCGTT
ACACAGGATAGCAGCCTGCAGGATGGTGAATTTATCTATAAAGTTAAACTGCGTGGCACGAATTTTCCGAGTGATGG
TCCGGTTATGCAGAAAAAAACCATGGGTTGGGAAGCAAGCAGCGAACGTATGTATCCGGAAGATGGCGCACTGAAAG
GTGAAATTAAACAGCGTCTGAAGCTGAAAGATGGCGGTCATTATGATGCAGAAGTTAAAACCACCTACAAAGCCAAA
AAACCGGTTCAGCTGCCTGGTGCATATAACGTTAACATTAAACTGGATATCACCAGCCACAACGAGGATTATACCAT
TGTTGAACAGTATGAACGTGCAGAAGGTCGCCATAGTACCGGTGGTATGGATGAACTGTATAAA
(LbCas12a (E795L)-LEA(EAAAK)₄ALEA(EAAAK)₄ALE(SEQ ID NO: 10)-
mCherry chimera DNA sequence)
SEQ ID NO: 415
ATGAGCAAACTGGAAAAGTTCACCAACTGTTATAGCCTGAGCAAAACCCTGCGTTTTAAAGCAATTCCGGTTGGTAA
AACCCAAGAGAACATTGATAATAAACGCCTGCTGGTCGAAGATGAAAAACGCGCTGAAGATTATAAAGGCGTGAAAA
AACTGCTGGATCGCTATTATCTGAGCTTCATTAACGATGTGCTGCACAGCATTAAACTGAAGAACCTGAACAACTAT
ATCAGCCTGTTTCGTAAAAAAACCCGCACCGAAAAAGAAAACAAAGAGCTGGAAAACCTGGAAATCAATCTGCGTAA
AGAAATCGCCAAAGCGTTTAAAGGTAACGAGGGTTATAAAAGCCTGTTCAAGAAAGACATCATCGAAACCATTCTGC
CGGAATTTCTGGATGATAAAGATGAAATTGCCCTGGTGAATAGCTTTAATGGCTTTACCACCGCATTTACCGGCTTT
TTTGATAATCGCGAAAACATGTTCAGCGAAGAAGCAAAAAGCACCAGCATTGCATTTCGCTGCATTAATGAAAATCT
GACCCGCTACATTAGCAACATGGATATCTTTGAAAAAGTGGACGCGATCTTCGATAAACACGAAGTGCAAGAGATCA
AAGAGAAAATCCTGAACAGCGATTATGACGTCGAAGATTTTTTTGAAGGCGAGTTCTTTAACTTCGTTCTGACCCAA
GAAGGTATCGACGTTTATAACGCAATTATTGGTGGTTTTGTTACCGAAAGCGGTGAGAAAATCAAAGGCCTGAATGA
ATATATCAACCTGTATAACCAGAAAACCAAACAGAAACTGCCGAAATTCAAACCGCTGTATAAACAGGTTCTGAGCG
ATCGTGAAAGCCTGAGCTTTTATGGTGAAGGTTATACCAGTGATGAAGAGGTTCTGGAAGTTTTTCGTAACACCCTG
AATAAAAACAGCGAGATCTTTAGCAGCATCAAAAAGCTTGAGAAACTGTTCAAAAACTTTGATGAGTATAGCAGCGC
AGGCATCTTTGTTAAAAATGGTCCGGCAATTAGCACCATCAGCAAAGATATTTTTGGCGAATGGAATGTGATCCGCG
ATAAATGGAATGCCGAATATGATGATATCCACCTGAAAAAAAAGGCCGTGGTGACCGAGAAATATGAAGATGATCGT
CGTAAAAGCTTCAAGAAAATTGGTAGCTTTAGCCTGGAACAGCTGCAAGAATATGCAGATGCAGATCTGAGCGTTGT
GGAAAAACTGAAAGAAATCATCATTCAGAAGGTGGACGAGATCTATAAAGTTTATGGTAGCAGCGAAAAACTGTTCG
ATGCAGATTTTGTTCTGGAAAAAAGCCTGAAAAAGAATGATGCCGTTGTGGCCATTATGAAAGATCTGCTGGATAGC
GTTAAGAGCTTCGAGAATTACATCAAAGCCTTTTTTGGTGAGGGCAAAGAAACCAATCGTGATGAAAGTTTCTATGG
CGATTTTGTGCTGGCCTATGATATTCTGCTGAAAGTGGACCATATTTATGATGCCATTCGCAATTATGTTACCCAGA
AACCGTATAGCAAAGACAAGTTCAAACTGTACTTTCAGAACCCGCAGTTTATGGGTGGTTGGGATAAAGATAAAGAA
ACCGATTATCGTGCCACCATCCTGCGTTATGGTAGTAAATACTATCTGGCCATCATGGACAAAAAATACGCAAAATG
CCTGCAGAAAATCGACAAAGATGATGTGAATGGCAACTATGAAAAAATCAACTACAAACTGCTGCCTGGTCCGAATA
AAATGCTGCCGAAAGTGTTCTTTAGCAAGAAATGGATGGCCTATTATAACCCGAGCGAGGATATTCAAAAGATCTAC
AAAAATGGCACCTTTAAAAAGGGCGACATGTTCAATCTGAACGATTGCCACAAACTGATCGATTTCTTCAAAGATTC
AATTTCGCGTTATCCGAAATGGTCCAATGCCTATGATTTTAACTTTAGCGAAACCGAAAAATACAAAGACATTGCCG
GTTTTTATCGCGAAGTGGAAGAACAGGGCTATAAAGTGAGCTTTGAAAGCGCAAGCAAAAAAGAGGTTGATAAGCTG
GTTGAAGAGGGCAAACTGTATATGTTCCAGATTTACAACAAAGATTTTAGCGACAAAAGCCATGGCACCCCGAATCT
GCATACCATGTACTTTAAACTGCTGTTCGACGAAAATAACCATGGTCAGATTCGTCTGAGCGGTGGTGCCGAACTGT
TTATGCGTCGTGCAAGTCTGAAAAAAGAAGAACTGGTTGTTCATCCGGCAAATAGCCCGATTGCAAACAAAAATCCG
GACAATCCGAAAAAAACCACGACACTGAGCTATGATGTGTATAAAGACAAACGTTTTAGCGAGGATCAGTATCTGCT
GCATATCCCGATTGCCATCAATAAATGCCCGAAAAACATCTTTAAGATCAACACCGAAGTTCGCGTGCTGCTGAAAC
ATGATGATAATCCGTATGTGATTGGCATTGATCGTGGTGAACGTAACCTGCTGTATATTGTTGTTGTTGATGGTAAA
GGCAACATCGTGGAACAGTATAGTCTGAACGAAATTATCAACAACTTTAACGGCATCCGCATCAAAACCGACTATCA
TAGCCTGCTGGACAAGAAAGAAAAAGAACGTTTTGAAGCACGTCAGAACTGGACCAGTATTGAAAACATCAAAGAAC
TGAAAGCCGGTTATATTAGCCAGGTGGTTCATAAAATCTGTGAGCTGGTAGAAAAATACGATGCAGTTATTGCACTG
GAAGATCTGAATAGCGGTTTCAAAAATAGCCGTGTGAAAGTCGAAAAACAGGTGTATCAGAAATTCGAGAAAATGCT
GATCGACAAACTGAACTACATGGTCGACAAAAAAAGCAATCCGTGTGCAACCGGTGGTGCACTGAAAGGTTATCAGA
TTACCAACAAATTTGAAAGCTTTAAAAGCATGAGCACCCAGAACGGCTTTATCTTCTATATTCCGGCATGGCTGACC
AGCAAAATTGATCCGAGCACCGGTTTTGTGAACCTGCTGAAAACAAAATATACCTCCATTGCCGACAGCAAGAAGTT
TATTAGCAGCTTTGATCGCATTATGTATGTTCCGGAAGAGGACCTGTTTGAATTCGCACTGGATTACAAAAATTTCA
GCCGTACCGATGCCGACTACATCAAAAAATGGAAACTGTACAGCTATGGTAACCGCATTCGCATTTTTCGCAACCCG
AAGAAAAACAATGTGTTCGATTGGGAAGAAGTTTGTCTGACCAGCGCATATAAAGAACTTTTCAACAAATACGGCAT
CAACTATCAGCAGGGTGATATTCGTGCACTGCTGTGTGAACAGAGCGATAAAGCGTTTTATAGCAGTTTTATGGCAC
TGATGAGCCTGATGCTGCAGATGCGTAATAGCATTACCGGTCGCACCGATGTGGATTTTCTGATTAGTCCGGTGAAA
AATTCCGATGGCATCTTTTATGATAGCCGCAATTACGAAGCACAAGAAAATGCAATTCTGCCGAAAAACGCAGATGC
AAATGGTGCATATAACATTGCACGTAAAGTTCTGTGGGCAATTGGCCAGTTTAAGAAAGCAGAAGATGAGAAGCTGG
ACAAAGTGAAAATTGCGATCAGCAATAAAGAGTGGCTGGAATACGCACAGACCAGCGTTAAACATTTAGAGGCTGAG
GCTGCTGCCAAGGAGGCTGCTGCGAAGGAAGCTGCAGCTAAAGAGGCAGCGGCCAAAGCACTTGAGGCCGAAGCCGC
CGCGAAAGAAGCCGCTGCTAAGGAGGCAGCCGCCAAAGAAGCGGCAGCTAAAGCATTAGAAATGGTGAGCAAAGGTG
AAGAGGATAATATGGCCATCATCAAAGAATTCATGCGCTTCAAAGTTCATATGGAAGGTAGCGTTAATGGCCACGAA
TTTGAAATTGAAGGTGAAGGCGAAGGTCGTCCGTATGAAGGCACCCAGACCGCAAAACTGAAAGTTACCAAAGGTGG
TCCGCTGCCGTTTGCATGGGATATTCTGAGTCCGCAGTTTATGTATGGTAGCAAAGCCTATGTTAAACATCCGGCAG
ATATCCCGGATTATCTGAAACTGAGCTTTCCGGAAGGTTTTAAATGGGAACGTGTGATGAATTTTGAAGATGGTGGT
GTTGTTACCGTTACACAGGATAGCAGCCTGCAGGATGGTGAATTTATCTATAAAGTTAAACTGCGTGGCACGAATTT
TCCGAGTGATGGTCCGGTTATGCAGAAAAAAACCATGGGTTGGGAAGCAAGCAGCGAACGTATGTATCCGGAAGATG
GCGCACTGAAAGGTGAAATTAAACAGCGTCTGAAGCTGAAAGATGGCGGTCATTATGATGCAGAAGTTAAAACCACC
TACAAAGCCAAAAAACCGGTTCAGCTGCCTGGTGCATATAACGTTAACATTAAACTGGATATCACCAGCCACAACGA
GGATTATACCATTGTTGAACAGTATGAACGTGCAGAAGGTCGCCATAGTACCGGTGGTATGGATGAACTGTATAAA
(LbCas12a (E795L)-APA-mCherry chimera DNA sequence)
SEQ ID NO: 416
ATGAGCAAACTGGAAAAGTTCACCAACTGTTATAGCCTGAGCAAAACCCTGCGTTTTAAAGCAATTCCGGTTGGTAA
AACCCAAGAGAACATTGATAATAAACGCCTGCTGGTCGAAGATGAAAAACGCGCTGAAGATTATAAAGGCGTGAAAA
AACTGCTGGATCGCTATTATCTGAGCTTCATTAACGATGTGCTGCACAGCATTAAACTGAAGAACCTGAACAACTAT
ATCAGCCTGTTTCGTAAAAAAACCCGCACCGAAAAAGAAAACAAAGAGCTGGAAAACCTGGAAATCAATCTGCGTAA
AGAAATCGCCAAAGCGTTTAAAGGTAACGAGGGTTATAAAAGCCTGTTCAAGAAAGACATCATCGAAACCATTCTGC
CGGAATTTCTGGATGATAAAGATGAAATTGCCCTGGTGAATAGCTTTAATGGCTTTACCACCGCATTTACCGGCTTT
TTTGATAATCGCGAAAACATGTTCAGCGAAGAAGCAAAAAGCACCAGCATTGCATTTCGCTGCATTAATGAAAATCT
GACCCGCTACATTAGCAACATGGATATCTTTGAAAAAGTGGACGCGATCTTCGATAAACACGAAGTGCAAGAGATCA
AAGAGAAAATCCTGAACAGCGATTATGACGTCGAAGATTTTTTTGAAGGCGAGTTCTTTAACTTCGTTCTGACCCAA
GAAGGTATCGACGTTTATAACGCAATTATTGGTGGTTTTGTTACCGAAAGCGGTGAGAAAATCAAAGGCCTGAATGA
ATATATCAACCTGTATAACCAGAAAACCAAACAGAAACTGCCGAAATTCAAACCGCTGTATAAACAGGTTCTGAGCG
ATCGTGAAAGCCTGAGCTTTTATGGTGAAGGTTATACCAGTGATGAAGAGGTTCTGGAAGTTTTTCGTAACACCCTG
AATAAAAACAGCGAGATCTTTAGCAGCATCAAAAAGCTTGAGAAACTGTTCAAAAACTTTGATGAGTATAGCAGCGC
AGGCATCTTTGTTAAAAATGGTCCGGCAATTAGCACCATCAGCAAAGATATTTTTGGCGAATGGAATGTGATCCGCG
ATAAATGGAATGCCGAATATGATGATATCCACCTGAAAAAAAAGGCCGTGGTGACCGAGAAATATGAAGATGATCGT
CGTAAAAGCTTCAAGAAAATTGGTAGCTTTAGCCTGGAACAGCTGCAAGAATATGCAGATGCAGATCTGAGCGTTGT
GGAAAAACTGAAAGAAATCATCATTCAGAAGGTGGACGAGATCTATAAAGTTTATGGTAGCAGCGAAAAACTGTTCG
ATGCAGATTTTGTTCTGGAAAAAAGCCTGAAAAAGAATGATGCCGTTGTGGCCATTATGAAAGATCTGCTGGATAGC
GTTAAGAGCTTCGAGAATTACATCAAAGCCTTTTTTGGTGAGGGCAAAGAAACCAATCGTGATGAAAGTTTCTATGG
CGATTTTGTGCTGGCCTATGATATTCTGCTGAAAGTGGACCATATTTATGATGCCATTCGCAATTATGTTACCCAGA
AACCGTATAGCAAAGACAAGTTCAAACTGTACTTTCAGAACCCGCAGTTTATGGGTGGTTGGGATAAAGATAAAGAA
ACCGATTATCGTGCCACCATCCTGCGTTATGGTAGTAAATACTATCTGGCCATCATGGACAAAAAATACGCAAAATG
CCTGCAGAAAATCGACAAAGATGATGTGAATGGCAACTATGAAAAAATCAACTACAAACTGCTGCCTGGTCCGAATA
AAATGCTGCCGAAAGTGTTCTTTAGCAAGAAATGGATGGCCTATTATAACCCGAGCGAGGATATTCAAAAGATCTAC
AAAAATGGCACCTTTAAAAAGGGCGACATGTTCAATCTGAACGATTGCCACAAACTGATCGATTTCTTCAAAGATTC
AATTTCGCGTTATCCGAAATGGTCCAATGCCTATGATTTTAACTTTAGCGAAACCGAAAAATACAAAGACATTGCCG
GTTTTTATCGCGAAGTGGAAGAACAGGGCTATAAAGTGAGCTTTGAAAGCGCAAGCAAAAAAGAGGTTGATAAGCTG
GTTGAAGAGGGCAAACTGTATATGTTCCAGATTTACAACAAAGATTTTAGCGACAAAAGCCATGGCACCCCGAATCT
GCATACCATGTACTTTAAACTGCTGTTCGACGAAAATAACCATGGTCAGATTCGTCTGAGCGGTGGTGCCGAACTGT
TTATGCGTCGTGCAAGTCTGAAAAAAGAAGAACTGGTTGTTCATCCGGCAAATAGCCCGATTGCAAACAAAAATCCG
GACAATCCGAAAAAAACCACGACACTGAGCTATGATGTGTATAAAGACAAACGTTTTAGCGAGGATCAGTATCTGCT
GCATATCCCGATTGCCATCAATAAATGCCCGAAAAACATCTTTAAGATCAACACCGAAGTTCGCGTGCTGCTGAAAC
ATGATGATAATCCGTATGTGATTGGCATTGATCGTGGTGAACGTAACCTGCTGTATATTGTTGTTGTTGATGGTAAA
GGCAACATCGTGGAACAGTATAGTCTGAACGAAATTATCAACAACTTTAACGGCATCCGCATCAAAACCGACTATCA
TAGCCTGCTGGACAAGAAAGAAAAAGAACGTTTTGAAGCACGTCAGAACTGGACCAGTATTGAAAACATCAAAGAAC
TGAAAGCCGGTTATATTAGCCAGGTGGTTCATAAAATCTGTGAGCTGGTAGAAAAATACGATGCAGTTATTGCACTG
GAAGATCTGAATAGCGGTTTCAAAAATAGCCGTGTGAAAGTCGAAAAACAGGTGTATCAGAAATTCGAGAAAATGCT
GATCGACAAACTGAACTACATGGTCGACAAAAAAAGCAATCCGTGTGCAACCGGTGGTGCACTGAAAGGTTATCAGA
TTACCAACAAATTTGAAAGCTTTAAAAGCATGAGCACCCAGAACGGCTTTATCTTCTATATTCCGGCATGGCTGACC
AGCAAAATTGATCCGAGCACCGGTTTTGTGAACCTGCTGAAAACAAAATATACCTCCATTGCCGACAGCAAGAAGTT
TATTAGCAGCTTTGATCGCATTATGTATGTTCCGGAAGAGGACCTGTTTGAATTCGCACTGGATTACAAAAATTTCA
GCCGTACCGATGCCGACTACATCAAAAAATGGAAACTGTACAGCTATGGTAACCGCATTCGCATTTTTCGCAACCCG
AAGAAAAACAATGTGTTCGATTGGGAAGAAGTTTGTCTGACCAGCGCATATAAAGAACTTTTCAACAAATACGGCAT
CAACTATCAGCAGGGTGATATTCGTGCACTGCTGTGTGAACAGAGCGATAAAGCGTTTTATAGCAGTTTTATGGCAC
TGATGAGCCTGATGCTGCAGATGCGTAATAGCATTACCGGTCGCACCGATGTGGATTTTCTGATTAGTCCGGTGAAA
AATTCCGATGGCATCTTTTATGATAGCCGCAATTACGAAGCACAAGAAAATGCAATTCTGCCGAAAAACGCAGATGC
AAATGGTGCATATAACATTGCACGTAAAGTTCTGTGGGCAATTGGCCAGTTTAAGAAAGCAGAAGATGAGAAGCTGG
ACAAAGTGAAAATTGCGATCAGCAATAAAGAGTGGCTGGAATACGCACAGACCAGCGTTAAACATGCACCTGCGATG
GTGAGCAAAGGTGAAGAGGATAATATGGCCATCATCAAAGAATTCATGCGCTTCAAAGTTCATATGGAAGGTAGCGT
TAATGGCCACGAATTTGAAATTGAAGGTGAAGGCGAAGGTCGTCCGTATGAAGGCACCCAGACCGCAAAACTGAAAG
TTACCAAAGGTGGTCCGCTGCCGTTTGCATGGGATATTCTGAGTCCGCAGTTTATGTATGGTAGCAAAGCCTATGTT
AAACATCCGGCAGATATCCCGGATTATCTGAAACTGAGCTTTCCGGAAGGTTTTAAATGGGAACGTGTGATGAATTT
TGAAGATGGTGGTGTTGTTACCGTTACACAGGATAGCAGCCTGCAGGATGGTGAATTTATCTATAAAGTTAAACTGC
GTGGCACGAATTTTCCGAGTGATGGTCCGGTTATGCAGAAAAAAACCATGGGTTGGGAAGCAAGCAGCGAACGTATG
TATCCGGAAGATGGCGCACTGAAAGGTGAAATTAAACAGCGTCTGAAGCTGAAAGATGGCGGTCATTATGATGCAGA
AGTTAAAACCACCTACAAAGCCAAAAAACCGGTTCAGCTGCCTGGTGCATATAACGTTAACATTAAACTGGATATCA
CCAGCCACAACGAGGATTATACCATTGTTGAACAGTATGAACGTGCAGAAGGTCGCCATAGTACCGGTGGTATGGAT
GAACTGTATAAA
(LbCas12a (E795L)-APAPA(SEQ ID NO: 11)-mCherry chimera DNA sequence)
SEQ ID NO: 417
ATGAGCAAACTGGAAAAGTTCACCAACTGTTATAGCCTGAGCAAAACCCTGCGTTTTAAAGCAATTCCGGTTGGTAA
AACCCAAGAGAACATTGATAATAAACGCCTGCTGGTCGAAGATGAAAAACGCGCTGAAGATTATAAAGGCGTGAAAA
AACTGCTGGATCGCTATTATCTGAGCTTCATTAACGATGTGCTGCACAGCATTAAACTGAAGAACCTGAACAACTAT
ATCAGCCTGTTTCGTAAAAAAACCCGCACCGAAAAAGAAAACAAAGAGCTGGAAAACCTGGAAATCAATCTGCGTAA
AGAAATCGCCAAAGCGTTTAAAGGTAACGAGGGTTATAAAAGCCTGTTCAAGAAAGACATCATCGAAACCATTCTGC
CGGAATTTCTGGATGATAAAGATGAAATTGCCCTGGTGAATAGCTTTAATGGCTTTACCACCGCATTTACCGGCTTT
TTTGATAATCGCGAAAACATGTTCAGCGAAGAAGCAAAAAGCACCAGCATTGCATTTCGCTGCATTAATGAAAATCT
GACCCGCTACATTAGCAACATGGATATCTTTGAAAAAGTGGACGCGATCTTCGATAAACACGAAGTGCAAGAGATCA
AAGAGAAAATCCTGAACAGCGATTATGACGTCGAAGATTTTTTTGAAGGCGAGTTCTTTAACTTCGTTCTGACCCAA
GAAGGTATCGACGTTTATAACGCAATTATTGGTGGTTTTGTTACCGAAAGCGGTGAGAAAATCAAAGGCCTGAATGA
ATATATCAACCTGTATAACCAGAAAACCAAACAGAAACTGCCGAAATTCAAACCGCTGTATAAACAGGTTCTGAGCG
ATCGTGAAAGCCTGAGCTTTTATGGTGAAGGTTATACCAGTGATGAAGAGGTTCTGGAAGTTTTTCGTAACACCCTG
AATAAAAACAGCGAGATCTTTAGCAGCATCAAAAAGCTTGAGAAACTGTTCAAAAACTTTGATGAGTATAGCAGCGC
AGGCATCTTTGTTAAAAATGGTCCGGCAATTAGCACCATCAGCAAAGATATTTTTGGCGAATGGAATGTGATCCGCG
ATAAATGGAATGCCGAATATGATGATATCCACCTGAAAAAAAAGGCCGTGGTGACCGAGAAATATGAAGATGATCGT
CGTAAAAGCTTCAAGAAAATTGGTAGCTTTAGCCTGGAACAGCTGCAAGAATATGCAGATGCAGATCTGAGCGTTGT
GGAAAAACTGAAAGAAATCATCATTCAGAAGGTGGACGAGATCTATAAAGTTTATGGTAGCAGCGAAAAACTGTTCG
ATGCAGATTTTGTTCTGGAAAAAAGCCTGAAAAAGAATGATGCCGTTGTGGCCATTATGAAAGATCTGCTGGATAGC
GTTAAGAGCTTCGAGAATTACATCAAAGCCTTTTTTGGTGAGGGCAAAGAAACCAATCGTGATGAAAGTTTCTATGG
CGATTTTGTGCTGGCCTATGATATTCTGCTGAAAGTGGACCATATTTATGATGCCATTCGCAATTATGTTACCCAGA
AACCGTATAGCAAAGACAAGTTCAAACTGTACTTTCAGAACCCGCAGTTTATGGGTGGTTGGGATAAAGATAAAGAA
ACCGATTATCGTGCCACCATCCTGCGTTATGGTAGTAAATACTATCTGGCCATCATGGACAAAAAATACGCAAAATG
CCTGCAGAAAATCGACAAAGATGATGTGAATGGCAACTATGAAAAAATCAACTACAAACTGCTGCCTGGTCCGAATA
AAATGCTGCCGAAAGTGTTCTTTAGCAAGAAATGGATGGCCTATTATAACCCGAGCGAGGATATTCAAAAGATCTAC
AAAAATGGCACCTTTAAAAAGGGCGACATGTTCAATCTGAACGATTGCCACAAACTGATCGATTTCTTCAAAGATTC
AATTTCGCGTTATCCGAAATGGTCCAATGCCTATGATTTTAACTTTAGCGAAACCGAAAAATACAAAGACATTGCCG
GTTTTTATCGCGAAGTGGAAGAACAGGGCTATAAAGTGAGCTTTGAAAGCGCAAGCAAAAAAGAGGTTGATAAGCTG
GTTGAAGAGGGCAAACTGTATATGTTCCAGATTTACAACAAAGATTTTAGCGACAAAAGCCATGGCACCCCGAATCT
GCATACCATGTACTTTAAACTGCTGTTCGACGAAAATAACCATGGTCAGATTCGTCTGAGCGGTGGTGCCGAACTGT
TTATGCGTCGTGCAAGTCTGAAAAAAGAAGAACTGGTTGTTCATCCGGCAAATAGCCCGATTGCAAACAAAAATCCG
GACAATCCGAAAAAAACCACGACACTGAGCTATGATGTGTATAAAGACAAACGTTTTAGCGAGGATCAGTATCTGCT
GCATATCCCGATTGCCATCAATAAATGCCCGAAAAACATCTTTAAGATCAACACCGAAGTTCGCGTGCTGCTGAAAC
ATGATGATAATCCGTATGTGATTGGCATTGATCGTGGTGAACGTAACCTGCTGTATATTGTTGTTGTTGATGGTAAA
GGCAACATCGTGGAACAGTATAGTCTGAACGAAATTATCAACAACTTTAACGGCATCCGCATCAAAACCGACTATCA
TAGCCTGCTGGACAAGAAAGAAAAAGAACGTTTTGAAGCACGTCAGAACTGGACCAGTATTGAAAACATCAAAGAAC
TGAAAGCCGGTTATATTAGCCAGGTGGTTCATAAAATCTGTGAGCTGGTAGAAAAATACGATGCAGTTATTGCACTG
GAAGATCTGAATAGCGGTTTCAAAAATAGCCGTGTGAAAGTCGAAAAACAGGTGTATCAGAAATTCGAGAAAATGCT
GATCGACAAACTGAACTACATGGTCGACAAAAAAAGCAATCCGTGTGCAACCGGTGGTGCACTGAAAGGTTATCAGA
TTACCAACAAATTTGAAAGCTTTAAAAGCATGAGCACCCAGAACGGCTTTATCTTCTATATTCCGGCATGGCTGACC
AGCAAAATTGATCCGAGCACCGGTTTTGTGAACCTGCTGAAAACAAAATATACCTCCATTGCCGACAGCAAGAAGTT
TATTAGCAGCTTTGATCGCATTATGTATGTTCCGGAAGAGGACCTGTTTGAATTCGCACTGGATTACAAAAATTTCA
GCCGTACCGATGCCGACTACATCAAAAAATGGAAACTGTACAGCTATGGTAACCGCATTCGCATTTTTCGCAACCCG
AAGAAAAACAATGTGTTCGATTGGGAAGAAGTTTGTCTGACCAGCGCATATAAAGAACTTTTCAACAAATACGGCAT
CAACTATCAGCAGGGTGATATTCGTGCACTGCTGTGTGAACAGAGCGATAAAGCGTTTTATAGCAGTTTTATGGCAC
TGATGAGCCTGATGCTGCAGATGCGTAATAGCATTACCGGTCGCACCGATGTGGATTTTCTGATTAGTCCGGTGAAA
AATTCCGATGGCATCTTTTATGATAGCCGCAATTACGAAGCACAAGAAAATGCAATTCTGCCGAAAAACGCAGATGC
AAATGGTGCATATAACATTGCACGTAAAGTTCTGTGGGCAATTGGCCAGTTTAAGAAAGCAGAAGATGAGAAGCTGG
ACAAAGTGAAAATTGCGATCAGCAATAAAGAGTGGCTGGAATACGCACAGACCAGCGTTAAACATGCTCCTGCACCT
GCGATGGTGAGCAAAGGTGAAGAGGATAATATGGCCATCATCAAAGAATTCATGCGCTTCAAAGTTCATATGGAAGG
TAGCGTTAATGGCCACGAATTTGAAATTGAAGGTGAAGGCGAAGGTCGTCCGTATGAAGGCACCCAGACCGCAAAAC
TGAAAGTTACCAAAGGTGGTCCGCTGCCGTTTGCATGGGATATTCTGAGTCCGCAGTTTATGTATGGTAGCAAAGCC
TATGTTAAACATCCGGCAGATATCCCGGATTATCTGAAACTGAGCTTTCCGGAAGGTTTTAAATGGGAACGTGTGAT
GAATTTTGAAGATGGTGGTGTTGTTACCGTTACACAGGATAGCAGCCTGCAGGATGGTGAATTTATCTATAAAGTTA
AACTGCGTGGCACGAATTTTCCGAGTGATGGTCCGGTTATGCAGAAAAAAACCATGGGTTGGGAAGCAAGCAGCGAA
CGTATGTATCCGGAAGATGGCGCACTGAAAGGTGAAATTAAACAGCGTCTGAAGCTGAAAGATGGCGGTCATTATGA
TGCAGAAGTTAAAACCACCTACAAAGCCAAAAAACCGGTTCAGCTGCCTGGTGCATATAACGTTAACATTAAACTGG
ATATCACCAGCCACAACGAGGATTATACCATTGTTGAACAGTATGAACGTGCAGAAGGTCGCCATAGTACCGGTGGT
ATGGATGAACTGTATAAA
(LbCas12a (E795L)-APAPAPA(SEQ ID NO: 12)-mCherry chimera DNA sequence)
SEQ ID NO: 418
ATGAGCAAACTGGAAAAGTTCACCAACTGTTATAGCCTGAGCAAAACCCTGCGTTTTAAAGCAATTCCGGTTGGTAA
AACCCAAGAGAACATTGATAATAAACGCCTGCTGGTCGAAGATGAAAAACGCGCTGAAGATTATAAAGGCGTGAAAA
AACTGCTGGATCGCTATTATCTGAGCTTCATTAACGATGTGCTGCACAGCATTAAACTGAAGAACCTGAACAACTAT
ATCAGCCTGTTTCGTAAAAAAACCCGCACCGAAAAAGAAAACAAAGAGCTGGAAAACCTGGAAATCAATCTGCGTAA
AGAAATCGCCAAAGCGTTTAAAGGTAACGAGGGTTATAAAAGCCTGTTCAAGAAAGACATCATCGAAACCATTCTGC
CGGAATTTCTGGATGATAAAGATGAAATTGCCCTGGTGAATAGCTTTAATGGCTTTACCACCGCATTTACCGGCTTT
TTTGATAATCGCGAAAACATGTTCAGCGAAGAAGCAAAAAGCACCAGCATTGCATTTCGCTGCATTAATGAAAATCT
GACCCGCTACATTAGCAACATGGATATCTTTGAAAAAGTGGACGCGATCTTCGATAAACACGAAGTGCAAGAGATCA
AAGAGAAAATCCTGAACAGCGATTATGACGTCGAAGATTTTTTTGAAGGCGAGTTCTTTAACTTCGTTCTGACCCAA
GAAGGTATCGACGTTTATAACGCAATTATTGGTGGTTTTGTTACCGAAAGCGGTGAGAAAATCAAAGGCCTGAATGA
ATATATCAACCTGTATAACCAGAAAACCAAACAGAAACTGCCGAAATTCAAACCGCTGTATAAACAGGTTCTGAGCG
ATCGTGAAAGCCTGAGCTTTTATGGTGAAGGTTATACCAGTGATGAAGAGGTTCTGGAAGTTTTTCGTAACACCCTG
AATAAAAACAGCGAGATCTTTAGCAGCATCAAAAAGCTTGAGAAACTGTTCAAAAACTTTGATGAGTATAGCAGCGC
AGGCATCTTTGTTAAAAATGGTCCGGCAATTAGCACCATCAGCAAAGATATTTTTGGCGAATGGAATGTGATCCGCG
ATAAATGGAATGCCGAATATGATGATATCCACCTGAAAAAAAAGGCCGTGGTGACCGAGAAATATGAAGATGATCGT
CGTAAAAGCTTCAAGAAAATTGGTAGCTTTAGCCTGGAACAGCTGCAAGAATATGCAGATGCAGATCTGAGCGTTGT
GGAAAAACTGAAAGAAATCATCATTCAGAAGGTGGACGAGATCTATAAAGTTTATGGTAGCAGCGAAAAACTGTTCG
ATGCAGATTTTGTTCTGGAAAAAAGCCTGAAAAAGAATGATGCCGTTGTGGCCATTATGAAAGATCTGCTGGATAGC
GTTAAGAGCTTCGAGAATTACATCAAAGCCTTTTTTGGTGAGGGCAAAGAAACCAATCGTGATGAAAGTTTCTATGG
CGATTTTGTGCTGGCCTATGATATTCTGCTGAAAGTGGACCATATTTATGATGCCATTCGCAATTATGTTACCCAGA
AACCGTATAGCAAAGACAAGTTCAAACTGTACTTTCAGAACCCGCAGTTTATGGGTGGTTGGGATAAAGATAAAGAA
ACCGATTATCGTGCCACCATCCTGCGTTATGGTAGTAAATACTATCTGGCCATCATGGACAAAAAATACGCAAAATG
CCTGCAGAAAATCGACAAAGATGATGTGAATGGCAACTATGAAAAAATCAACTACAAACTGCTGCCTGGTCCGAATA
AAATGCTGCCGAAAGTGTTCTTTAGCAAGAAATGGATGGCCTATTATAACCCGAGCGAGGATATTCAAAAGATCTAC
AAAAATGGCACCTTTAAAAAGGGCGACATGTTCAATCTGAACGATTGCCACAAACTGATCGATTTCTTCAAAGATTC
AATTTCGCGTTATCCGAAATGGTCCAATGCCTATGATTTTAACTTTAGCGAAACCGAAAAATACAAAGACATTGCCG
GTTTTTATCGCGAAGTGGAAGAACAGGGCTATAAAGTGAGCTTTGAAAGCGCAAGCAAAAAAGAGGTTGATAAGCTG
GTTGAAGAGGGCAAACTGTATATGTTCCAGATTTACAACAAAGATTTTAGCGACAAAAGCCATGGCACCCCGAATCT
GCATACCATGTACTTTAAACTGCTGTTCGACGAAAATAACCATGGTCAGATTCGTCTGAGCGGTGGTGCCGAACTGT
TTATGCGTCGTGCAAGTCTGAAAAAAGAAGAACTGGTTGTTCATCCGGCAAATAGCCCGATTGCAAACAAAAATCCG
GACAATCCGAAAAAAACCACGACACTGAGCTATGATGTGTATAAAGACAAACGTTTTAGCGAGGATCAGTATCTGCT
GCATATCCCGATTGCCATCAATAAATGCCCGAAAAACATCTTTAAGATCAACACCGAAGTTCGCGTGCTGCTGAAAC
ATGATGATAATCCGTATGTGATTGGCATTGATCGTGGTGAACGTAACCTGCTGTATATTGTTGTTGTTGATGGTAAA
GGCAACATCGTGGAACAGTATAGTCTGAACGAAATTATCAACAACTTTAACGGCATCCGCATCAAAACCGACTATCA
TAGCCTGCTGGACAAGAAAGAAAAAGAACGTTTTGAAGCACGTCAGAACTGGACCAGTATTGAAAACATCAAAGAAC
TGAAAGCCGGTTATATTAGCCAGGTGGTTCATAAAATCTGTGAGCTGGTAGAAAAATACGATGCAGTTATTGCACTG
GAAGATCTGAATAGCGGTTTCAAAAATAGCCGTGTGAAAGTCGAAAAACAGGTGTATCAGAAATTCGAGAAAATGCT
GATCGACAAACTGAACTACATGGTCGACAAAAAAAGCAATCCGTGTGCAACCGGTGGTGCACTGAAAGGTTATCAGA
TTACCAACAAATTTGAAAGCTTTAAAAGCATGAGCACCCAGAACGGCTTTATCTTCTATATTCCGGCATGGCTGACC
AGCAAAATTGATCCGAGCACCGGTTTTGTGAACCTGCTGAAAACAAAATATACCTCCATTGCCGACAGCAAGAAGTT
TATTAGCAGCTTTGATCGCATTATGTATGTTCCGGAAGAGGACCTGTTTGAATTCGCACTGGATTACAAAAATTTCA
GCCGTACCGATGCCGACTACATCAAAAAATGGAAACTGTACAGCTATGGTAACCGCATTCGCATTTTTCGCAACCCG
AAGAAAAACAATGTGTTCGATTGGGAAGAAGTTTGTCTGACCAGCGCATATAAAGAACTTTTCAACAAATACGGCAT
CAACTATCAGCAGGGTGATATTCGTGCACTGCTGTGTGAACAGAGCGATAAAGCGTTTTATAGCAGTTTTATGGCAC
TGATGAGCCTGATGCTGCAGATGCGTAATAGCATTACCGGTCGCACCGATGTGGATTTTCTGATTAGTCCGGTGAAA
AATTCCGATGGCATCTTTTATGATAGCCGCAATTACGAAGCACAAGAAAATGCAATTCTGCCGAAAAACGCAGATGC
AAATGGTGCATATAACATTGCACGTAAAGTTCTGTGGGCAATTGGCCAGTTTAAGAAAGCAGAAGATGAGAAGCTGG
ACAAAGTGAAAATTGCGATCAGCAATAAAGAGTGGCTGGAATACGCACAGACCAGCGTTAAACATGCGCCAGCTCCT
GCACCTGCGATGGTGAGCAAAGGTGAAGAGGATAATATGGCCATCATCAAAGAATTCATGCGCTTCAAAGTTCATAT
GGAAGGTAGCGTTAATGGCCACGAATTTGAAATTGAAGGTGAAGGCGAAGGTCGTCCGTATGAAGGCACCCAGACCG
CAAAACTGAAAGTTACCAAAGGTGGTCCGCTGCCGTTTGCATGGGATATTCTGAGTCCGCAGTTTATGTATGGTAGC
AAAGCCTATGTTAAACATCCGGCAGATATCCCGGATTATCTGAAACTGAGCTTTCCGGAAGGTTTTAAATGGGAACG
TGTGATGAATTTTGAAGATGGTGGTGTTGTTACCGTTACACAGGATAGCAGCCTGCAGGATGGTGAATTTATCTATA
AAGTTAAACTGCGTGGCACGAATTTTCCGAGTGATGGTCCGGTTATGCAGAAAAAAACCATGGGTTGGGAAGCAAGC
AGCGAACGTATGTATCCGGAAGATGGCGCACTGAAAGGTGAAATTAAACAGCGTCTGAAGCTGAAAGATGGCGGTCA
TTATGATGCAGAAGTTAAAACCACCTACAAAGCCAAAAAACCGGTTCAGCTGCCTGGTGCATATAACGTTAACATTA
AACTGGATATCACCAGCCACAACGAGGATTATACCATTGTTGAACAGTATGAACGTGCAGAAGGTCGCCATAGTACC
GGTGGTATGGATGAACTGTATAAA
(LbCas12a (E795L)-APAPAPAPA(SEQ ID NO: 13)-mCherry chimera DNA sequence)
SEQ ID NO: 419
ATGAGCAAACTGGAAAAGTTCACCAACTGTTATAGCCTGAGCAAAACCCTGCGTTTTAAAGCAATTCCGGTTGGTAA
AACCCAAGAGAACATTGATAATAAACGCCTGCTGGTCGAAGATGAAAAACGCGCTGAAGATTATAAAGGCGTGAAAA
AACTGCTGGATCGCTATTATCTGAGCTTCATTAACGATGTGCTGCACAGCATTAAACTGAAGAACCTGAACAACTAT
ATCAGCCTGTTTCGTAAAAAAACCCGCACCGAAAAAGAAAACAAAGAGCTGGAAAACCTGGAAATCAATCTGCGTAA
AGAAATCGCCAAAGCGTTTAAAGGTAACGAGGGTTATAAAAGCCTGTTCAAGAAAGACATCATCGAAACCATTCTGC
CGGAATTTCTGGATGATAAAGATGAAATTGCCCTGGTGAATAGCTTTAATGGCTTTACCACCGCATTTACCGGCTTT
TTTGATAATCGCGAAAACATGTTCAGCGAAGAAGCAAAAAGCACCAGCATTGCATTTCGCTGCATTAATGAAAATCT
GACCCGCTACATTAGCAACATGGATATCTTTGAAAAAGTGGACGCGATCTTCGATAAACACGAAGTGCAAGAGATCA
AAGAGAAAATCCTGAACAGCGATTATGACGTCGAAGATTTTTTTGAAGGCGAGTTCTTTAACTTCGTTCTGACCCAA
GAAGGTATCGACGTTTATAACGCAATTATTGGTGGTTTTGTTACCGAAAGCGGTGAGAAAATCAAAGGCCTGAATGA
ATATATCAACCTGTATAACCAGAAAACCAAACAGAAACTGCCGAAATTCAAACCGCTGTATAAACAGGTTCTGAGCG
ATCGTGAAAGCCTGAGCTTTTATGGTGAAGGTTATACCAGTGATGAAGAGGTTCTGGAAGTTTTTCGTAACACCCTG
AATAAAAACAGCGAGATCTTTAGCAGCATCAAAAAGCTTGAGAAACTGTTCAAAAACTTTGATGAGTATAGCAGCGC
AGGCATCTTTGTTAAAAATGGTCCGGCAATTAGCACCATCAGCAAAGATATTTTTGGCGAATGGAATGTGATCCGCG
ATAAATGGAATGCCGAATATGATGATATCCACCTGAAAAAAAAGGCCGTGGTGACCGAGAAATATGAAGATGATCGT
CGTAAAAGCTTCAAGAAAATTGGTAGCTTTAGCCTGGAACAGCTGCAAGAATATGCAGATGCAGATCTGAGCGTTGT
GGAAAAACTGAAAGAAATCATCATTCAGAAGGTGGACGAGATCTATAAAGTTTATGGTAGCAGCGAAAAACTGTTCG
ATGCAGATTTTGTTCTGGAAAAAAGCCTGAAAAAGAATGATGCCGTTGTGGCCATTATGAAAGATCTGCTGGATAGC
GTTAAGAGCTTCGAGAATTACATCAAAGCCTTTTTTGGTGAGGGCAAAGAAACCAATCGTGATGAAAGTTTCTATGG
CGATTTTGTGCTGGCCTATGATATTCTGCTGAAAGTGGACCATATTTATGATGCCATTCGCAATTATGTTACCCAGA
AACCGTATAGCAAAGACAAGTTCAAACTGTACTTTCAGAACCCGCAGTTTATGGGTGGTTGGGATAAAGATAAAGAA
ACCGATTATCGTGCCACCATCCTGCGTTATGGTAGTAAATACTATCTGGCCATCATGGACAAAAAATACGCAAAATG
CCTGCAGAAAATCGACAAAGATGATGTGAATGGCAACTATGAAAAAATCAACTACAAACTGCTGCCTGGTCCGAATA
AAATGCTGCCGAAAGTGTTCTTTAGCAAGAAATGGATGGCCTATTATAACCCGAGCGAGGATATTCAAAAGATCTAC
AAAAATGGCACCTTTAAAAAGGGCGACATGTTCAATCTGAACGATTGCCACAAACTGATCGATTTCTTCAAAGATTC
AATTTCGCGTTATCCGAAATGGTCCAATGCCTATGATTTTAACTTTAGCGAAACCGAAAAATACAAAGACATTGCCG
GTTTTTATCGCGAAGTGGAAGAACAGGGCTATAAAGTGAGCTTTGAAAGCGCAAGCAAAAAAGAGGTTGATAAGCTG
GTTGAAGAGGGCAAACTGTATATGTTCCAGATTTACAACAAAGATTTTAGCGACAAAAGCCATGGCACCCCGAATCT
GCATACCATGTACTTTAAACTGCTGTTCGACGAAAATAACCATGGTCAGATTCGTCTGAGCGGTGGTGCCGAACTGT
TTATGCGTCGTGCAAGTCTGAAAAAAGAAGAACTGGTTGTTCATCCGGCAAATAGCCCGATTGCAAACAAAAATCCG
GACAATCCGAAAAAAACCACGACACTGAGCTATGATGTGTATAAAGACAAACGTTTTAGCGAGGATCAGTATCTGCT
GCATATCCCGATTGCCATCAATAAATGCCCGAAAAACATCTTTAAGATCAACACCGAAGTTCGCGTGCTGCTGAAAC
ATGATGATAATCCGTATGTGATTGGCATTGATCGTGGTGAACGTAACCTGCTGTATATTGTTGTTGTTGATGGTAAA
GGCAACATCGTGGAACAGTATAGTCTGAACGAAATTATCAACAACTTTAACGGCATCCGCATCAAAACCGACTATCA
TAGCCTGCTGGACAAGAAAGAAAAAGAACGTTTTGAAGCACGTCAGAACTGGACCAGTATTGAAAACATCAAAGAAC
TGAAAGCCGGTTATATTAGCCAGGTGGTTCATAAAATCTGTGAGCTGGTAGAAAAATACGATGCAGTTATTGCACTG
GAAGATCTGAATAGCGGTTTCAAAAATAGCCGTGTGAAAGTCGAAAAACAGGTGTATCAGAAATTCGAGAAAATGCT
GATCGACAAACTGAACTACATGGTCGACAAAAAAAGCAATCCGTGTGCAACCGGTGGTGCACTGAAAGGTTATCAGA
TTACCAACAAATTTGAAAGCTTTAAAAGCATGAGCACCCAGAACGGCTTTATCTTCTATATTCCGGCATGGCTGACC
AGCAAAATTGATCCGAGCACCGGTTTTGTGAACCTGCTGAAAACAAAATATACCTCCATTGCCGACAGCAAGAAGTT
TATTAGCAGCTTTGATCGCATTATGTATGTTCCGGAAGAGGACCTGTTTGAATTCGCACTGGATTACAAAAATTTCA
GCCGTACCGATGCCGACTACATCAAAAAATGGAAACTGTACAGCTATGGTAACCGCATTCGCATTTTTCGCAACCCG
AAGAAAAACAATGTGTTCGATTGGGAAGAAGTTTGTCTGACCAGCGCATATAAAGAACTTTTCAACAAATACGGCAT
CAACTATCAGCAGGGTGATATTCGTGCACTGCTGTGTGAACAGAGCGATAAAGCGTTTTATAGCAGTTTTATGGCAC
TGATGAGCCTGATGCTGCAGATGCGTAATAGCATTACCGGTCGCACCGATGTGGATTTTCTGATTAGTCCGGTGAAA
AATTCCGATGGCATCTTTTATGATAGCCGCAATTACGAAGCACAAGAAAATGCAATTCTGCCGAAAAACGCAGATGC
AAATGGTGCATATAACATTGCACGTAAAGTTCTGTGGGCAATTGGCCAGTTTAAGAAAGCAGAAGATGAGAAGCTGG
ACAAAGTGAAAATTGCGATCAGCAATAAAGAGTGGCTGGAATACGCACAGACCAGCGTTAAACATGCTCCTGCGCCA
GCTCCTGCACCTGCGATGGTGAGCAAAGGTGAAGAGGATAATATGGCCATCATCAAAGAATTCATGCGCTTCAAAGT
TCATATGGAAGGTAGCGTTAATGGCCACGAATTTGAAATTGAAGGTGAAGGCGAAGGTCGTCCGTATGAAGGCACCC
AGACCGCAAAACTGAAAGTTACCAAAGGTGGTCCGCTGCCGTTTGCATGGGATATTCTGAGTCCGCAGTTTATGTAT
GGTAGCAAAGCCTATGTTAAACATCCGGCAGATATCCCGGATTATCTGAAACTGAGCTTTCCGGAAGGTTTTAAATG
GGAACGTGTGATGAATTTTGAAGATGGTGGTGTTGTTACCGTTACACAGGATAGCAGCCTGCAGGATGGTGAATTTA
TCTATAAAGTTAAACTGCGTGGCACGAATTTTCCGAGTGATGGTCCGGTTATGCAGAAAAAAACCATGGGTTGGGAA
GCAAGCAGCGAACGTATGTATCCGGAAGATGGCGCACTGAAAGGTGAAATTAAACAGCGTCTGAAGCTGAAAGATGG
CGGTCATTATGATGCAGAAGTTAAAACCACCTACAAAGCCAAAAAACCGGTTCAGCTGCCTGGTGCATATAACGTTA
ACATTAAACTGGATATCACCAGCCACAACGAGGATTATACCATTGTTGAACAGTATGAACGTGCAGAAGGTCGCCAT
AGTACCGGTGGTATGGATGAACTGTATAAA
(LbCas12a (E795L)-APAPAPAPAPA(SEQ ID NO: 14)-mCherry chimera DNA sequence)
SEQ ID NO: 420
ATGAGCAAACTGGAAAAGTTCACCAACTGTTATAGCCTGAGCAAAACCCTGCGTTTTAAAGCAATTCCGGTTGGTAA
AACCCAAGAGAACATTGATAATAAACGCCTGCTGGTCGAAGATGAAAAACGCGCTGAAGATTATAAAGGCGTGAAAA
AACTGCTGGATCGCTATTATCTGAGCTTCATTAACGATGTGCTGCACAGCATTAAACTGAAGAACCTGAACAACTAT
ATCAGCCTGTTTCGTAAAAAAACCCGCACCGAAAAAGAAAACAAAGAGCTGGAAAACCTGGAAATCAATCTGCGTAA
AGAAATCGCCAAAGCGTTTAAAGGTAACGAGGGTTATAAAAGCCTGTTCAAGAAAGACATCATCGAAACCATTCTGC
CGGAATTTCTGGATGATAAAGATGAAATTGCCCTGGTGAATAGCTTTAATGGCTTTACCACCGCATTTACCGGCTTT
TTTGATAATCGCGAAAACATGTTCAGCGAAGAAGCAAAAAGCACCAGCATTGCATTTCGCTGCATTAATGAAAATCT
GACCCGCTACATTAGCAACATGGATATCTTTGAAAAAGTGGACGCGATCTTCGATAAACACGAAGTGCAAGAGATCA
AAGAGAAAATCCTGAACAGCGATTATGACGTCGAAGATTTTTTTGAAGGCGAGTTCTTTAACTTCGTTCTGACCCAA
GAAGGTATCGACGTTTATAACGCAATTATTGGTGGTTTTGTTACCGAAAGCGGTGAGAAAATCAAAGGCCTGAATGA
ATATATCAACCTGTATAACCAGAAAACCAAACAGAAACTGCCGAAATTCAAACCGCTGTATAAACAGGTTCTGAGCG
ATCGTGAAAGCCTGAGCTTTTATGGTGAAGGTTATACCAGTGATGAAGAGGTTCTGGAAGTTTTTCGTAACACCCTG
AATAAAAACAGCGAGATCTTTAGCAGCATCAAAAAGCTTGAGAAACTGTTCAAAAACTTTGATGAGTATAGCAGCGC
AGGCATCTTTGTTAAAAATGGTCCGGCAATTAGCACCATCAGCAAAGATATTTTTGGCGAATGGAATGTGATCCGCG
ATAAATGGAATGCCGAATATGATGATATCCACCTGAAAAAAAAGGCCGTGGTGACCGAGAAATATGAAGATGATCGT
CGTAAAAGCTTCAAGAAAATTGGTAGCTTTAGCCTGGAACAGCTGCAAGAATATGCAGATGCAGATCTGAGCGTTGT
GGAAAAACTGAAAGAAATCATCATTCAGAAGGTGGACGAGATCTATAAAGTTTATGGTAGCAGCGAAAAACTGTTCG
ATGCAGATTTTGTTCTGGAAAAAAGCCTGAAAAAGAATGATGCCGTTGTGGCCATTATGAAAGATCTGCTGGATAGC
GTTAAGAGCTTCGAGAATTACATCAAAGCCTTTTTTGGTGAGGGCAAAGAAACCAATCGTGATGAAAGTTTCTATGG
CGATTTTGTGCTGGCCTATGATATTCTGCTGAAAGTGGACCATATTTATGATGCCATTCGCAATTATGTTACCCAGA
AACCGTATAGCAAAGACAAGTTCAAACTGTACTTTCAGAACCCGCAGTTTATGGGTGGTTGGGATAAAGATAAAGAA
ACCGATTATCGTGCCACCATCCTGCGTTATGGTAGTAAATACTATCTGGCCATCATGGACAAAAAATACGCAAAATG
CCTGCAGAAAATCGACAAAGATGATGTGAATGGCAACTATGAAAAAATCAACTACAAACTGCTGCCTGGTCCGAATA
AAATGCTGCCGAAAGTGTTCTTTAGCAAGAAATGGATGGCCTATTATAACCCGAGCGAGGATATTCAAAAGATCTAC
AAAAATGGCACCTTTAAAAAGGGCGACATGTTCAATCTGAACGATTGCCACAAACTGATCGATTTCTTCAAAGATTC
AATTTCGCGTTATCCGAAATGGTCCAATGCCTATGATTTTAACTTTAGCGAAACCGAAAAATACAAAGACATTGCCG
GTTTTTATCGCGAAGTGGAAGAACAGGGCTATAAAGTGAGCTTTGAAAGCGCAAGCAAAAAAGAGGTTGATAAGCTG
GTTGAAGAGGGCAAACTGTATATGTTCCAGATTTACAACAAAGATTTTAGCGACAAAAGCCATGGCACCCCGAATCT
GCATACCATGTACTTTAAACTGCTGTTCGACGAAAATAACCATGGTCAGATTCGTCTGAGCGGTGGTGCCGAACTGT
TTATGCGTCGTGCAAGTCTGAAAAAAGAAGAACTGGTTGTTCATCCGGCAAATAGCCCGATTGCAAACAAAAATCCG
GACAATCCGAAAAAAACCACGACACTGAGCTATGATGTGTATAAAGACAAACGTTTTAGCGAGGATCAGTATCTGCT
GCATATCCCGATTGCCATCAATAAATGCCCGAAAAACATCTTTAAGATCAACACCGAAGTTCGCGTGCTGCTGAAAC
ATGATGATAATCCGTATGTGATTGGCATTGATCGTGGTGAACGTAACCTGCTGTATATTGTTGTTGTTGATGGTAAA
GGCAACATCGTGGAACAGTATAGTCTGAACGAAATTATCAACAACTTTAACGGCATCCGCATCAAAACCGACTATCA
TAGCCTGCTGGACAAGAAAGAAAAAGAACGTTTTGAAGCACGTCAGAACTGGACCAGTATTGAAAACATCAAAGAAC
TGAAAGCCGGTTATATTAGCCAGGTGGTTCATAAAATCTGTGAGCTGGTAGAAAAATACGATGCAGTTATTGCACTG
GAAGATCTGAATAGCGGTTTCAAAAATAGCCGTGTGAAAGTCGAAAAACAGGTGTATCAGAAATTCGAGAAAATGCT
GATCGACAAACTGAACTACATGGTCGACAAAAAAAGCAATCCGTGTGCAACCGGTGGTGCACTGAAAGGTTATCAGA
TTACCAACAAATTTGAAAGCTTTAAAAGCATGAGCACCCAGAACGGCTTTATCTTCTATATTCCGGCATGGCTGACC
AGCAAAATTGATCCGAGCACCGGTTTTGTGAACCTGCTGAAAACAAAATATACCTCCATTGCCGACAGCAAGAAGTT
TATTAGCAGCTTTGATCGCATTATGTATGTTCCGGAAGAGGACCTGTTTGAATTCGCACTGGATTACAAAAATTTCA
GCCGTACCGATGCCGACTACATCAAAAAATGGAAACTGTACAGCTATGGTAACCGCATTCGCATTTTTCGCAACCCG
AAGAAAAACAATGTGTTCGATTGGGAAGAAGTTTGTCTGACCAGCGCATATAAAGAACTTTTCAACAAATACGGCAT
CAACTATCAGCAGGGTGATATTCGTGCACTGCTGTGTGAACAGAGCGATAAAGCGTTTTATAGCAGTTTTATGGCAC
TGATGAGCCTGATGCTGCAGATGCGTAATAGCATTACCGGTCGCACCGATGTGGATTTTCTGATTAGTCCGGTGAAA
AATTCCGATGGCATCTTTTATGATAGCCGCAATTACGAAGCACAAGAAAATGCAATTCTGCCGAAAAACGCAGATGC
AAATGGTGCATATAACATTGCACGTAAAGTTCTGTGGGCAATTGGCCAGTTTAAGAAAGCAGAAGATGAGAAGCTGG
ACAAAGTGAAAATTGCGATCAGCAATAAAGAGTGGCTGGAATACGCACAGACCAGCGTTAAACATGCGCCCGCTCCT
GCGCCAGCTCCTGCACCTGCGATGGTGAGCAAAGGTGAAGAGGATAATATGGCCATCATCAAAGAATTCATGCGCTT
CAAAGTTCATATGGAAGGTAGCGTTAATGGCCACGAATTTGAAATTGAAGGTGAAGGCGAAGGTCGTCCGTATGAAG
GCACCCAGACCGCAAAACTGAAAGTTACCAAAGGTGGTCCGCTGCCGTTTGCATGGGATATTCTGAGTCCGCAGTTT
ATGTATGGTAGCAAAGCCTATGTTAAACATCCGGCAGATATCCCGGATTATCTGAAACTGAGCTTTCCGGAAGGTTT
TAAATGGGAACGTGTGATGAATTTTGAAGATGGTGGTGTTGTTACCGTTACACAGGATAGCAGCCTGCAGGATGGTG
AATTTATCTATAAAGTTAAACTGCGTGGCACGAATTTTCCGAGTGATGGTCCGGTTATGCAGAAAAAAACCATGGGT
TGGGAAGCAAGCAGCGAACGTATGTATCCGGAAGATGGCGCACTGAAAGGTGAAATTAAACAGCGTCTGAAGCTGAA
AGATGGCGGTCATTATGATGCAGAAGTTAAAACCACCTACAAAGCCAAAAAACCGGTTCAGCTGCCTGGTGCATATA
ACGTTAACATTAAACTGGATATCACCAGCCACAACGAGGATTATACCATTGTTGAACAGTATGAACGTGCAGAAGGT
CGCCATAGTACCGGTGGTATGGATGAACTGTATAAA
(LbCas12a (E795L)-APAPAPAPAPAPA(SEQ ID NO: 15)-mCherry chimera DNA sequence)
SEQ ID NO: 421
ATGAGCAAACTGGAAAAGTTCACCAACTGTTATAGCCTGAGCAAAACCCTGCGTTTTAAAGCAATTCCGGTTGGTAA
AACCCAAGAGAACATTGATAATAAACGCCTGCTGGTCGAAGATGAAAAACGCGCTGAAGATTATAAAGGCGTGAAAA
AACTGCTGGATCGCTATTATCTGAGCTTCATTAACGATGTGCTGCACAGCATTAAACTGAAGAACCTGAACAACTAT
ATCAGCCTGTTTCGTAAAAAAACCCGCACCGAAAAAGAAAACAAAGAGCTGGAAAACCTGGAAATCAATCTGCGTAA
AGAAATCGCCAAAGCGTTTAAAGGTAACGAGGGTTATAAAAGCCTGTTCAAGAAAGACATCATCGAAACCATTCTGC
CGGAATTTCTGGATGATAAAGATGAAATTGCCCTGGTGAATAGCTTTAATGGCTTTACCACCGCATTTACCGGCTTT
TTTGATAATCGCGAAAACATGTTCAGCGAAGAAGCAAAAAGCACCAGCATTGCATTTCGCTGCATTAATGAAAATCT
GACCCGCTACATTAGCAACATGGATATCTTTGAAAAAGTGGACGCGATCTTCGATAAACACGAAGTGCAAGAGATCA
AAGAGAAAATCCTGAACAGCGATTATGACGTCGAAGATTTTTTTGAAGGCGAGTTCTTTAACTTCGTTCTGACCCAA
GAAGGTATCGACGTTTATAACGCAATTATTGGTGGTTTTGTTACCGAAAGCGGTGAGAAAATCAAAGGCCTGAATGA
ATATATCAACCTGTATAACCAGAAAACCAAACAGAAACTGCCGAAATTCAAACCGCTGTATAAACAGGTTCTGAGCG
ATCGTGAAAGCCTGAGCTTTTATGGTGAAGGTTATACCAGTGATGAAGAGGTTCTGGAAGTTTTTCGTAACACCCTG
AATAAAAACAGCGAGATCTTTAGCAGCATCAAAAAGCTTGAGAAACTGTTCAAAAACTTTGATGAGTATAGCAGCGC
AGGCATCTTTGTTAAAAATGGTCCGGCAATTAGCACCATCAGCAAAGATATTTTTGGCGAATGGAATGTGATCCGCG
ATAAATGGAATGCCGAATATGATGATATCCACCTGAAAAAAAAGGCCGTGGTGACCGAGAAATATGAAGATGATCGT
CGTAAAAGCTTCAAGAAAATTGGTAGCTTTAGCCTGGAACAGCTGCAAGAATATGCAGATGCAGATCTGAGCGTTGT
GGAAAAACTGAAAGAAATCATCATTCAGAAGGTGGACGAGATCTATAAAGTTTATGGTAGCAGCGAAAAACTGTTCG
ATGCAGATTTTGTTCTGGAAAAAAGCCTGAAAAAGAATGATGCCGTTGTGGCCATTATGAAAGATCTGCTGGATAGC
GTTAAGAGCTTCGAGAATTACATCAAAGCCTTTTTTGGTGAGGGCAAAGAAACCAATCGTGATGAAAGTTTCTATGG
CGATTTTGTGCTGGCCTATGATATTCTGCTGAAAGTGGACCATATTTATGATGCCATTCGCAATTATGTTACCCAGA
AACCGTATAGCAAAGACAAGTTCAAACTGTACTTTCAGAACCCGCAGTTTATGGGTGGTTGGGATAAAGATAAAGAA
ACCGATTATCGTGCCACCATCCTGCGTTATGGTAGTAAATACTATCTGGCCATCATGGACAAAAAATACGCAAAATG
CCTGCAGAAAATCGACAAAGATGATGTGAATGGCAACTATGAAAAAATCAACTACAAACTGCTGCCTGGTCCGAATA
AAATGCTGCCGAAAGTGTTCTTTAGCAAGAAATGGATGGCCTATTATAACCCGAGCGAGGATATTCAAAAGATCTAC
AAAAATGGCACCTTTAAAAAGGGCGACATGTTCAATCTGAACGATTGCCACAAACTGATCGATTTCTTCAAAGATTC
AATTTCGCGTTATCCGAAATGGTCCAATGCCTATGATTTTAACTTTAGCGAAACCGAAAAATACAAAGACATTGCCG
GTTTTTATCGCGAAGTGGAAGAACAGGGCTATAAAGTGAGCTTTGAAAGCGCAAGCAAAAAAGAGGTTGATAAGCTG
GTTGAAGAGGGCAAACTGTATATGTTCCAGATTTACAACAAAGATTTTAGCGACAAAAGCCATGGCACCCCGAATCT
GCATACCATGTACTTTAAACTGCTGTTCGACGAAAATAACCATGGTCAGATTCGTCTGAGCGGTGGTGCCGAACTGT
TTATGCGTCGTGCAAGTCTGAAAAAAGAAGAACTGGTTGTTCATCCGGCAAATAGCCCGATTGCAAACAAAAATCCG
GACAATCCGAAAAAAACCACGACACTGAGCTATGATGTGTATAAAGACAAACGTTTTAGCGAGGATCAGTATCTGCT
GCATATCCCGATTGCCATCAATAAATGCCCGAAAAACATCTTTAAGATCAACACCGAAGTTCGCGTGCTGCTGAAAC
ATGATGATAATCCGTATGTGATTGGCATTGATCGTGGTGAACGTAACCTGCTGTATATTGTTGTTGTTGATGGTAAA
GGCAACATCGTGGAACAGTATAGTCTGAACGAAATTATCAACAACTTTAACGGCATCCGCATCAAAACCGACTATCA
TAGCCTGCTGGACAAGAAAGAAAAAGAACGTTTTGAAGCACGTCAGAACTGGACCAGTATTGAAAACATCAAAGAAC
TGAAAGCCGGTTATATTAGCCAGGTGGTTCATAAAATCTGTGAGCTGGTAGAAAAATACGATGCAGTTATTGCACTG
GAAGATCTGAATAGCGGTTTCAAAAATAGCCGTGTGAAAGTCGAAAAACAGGTGTATCAGAAATTCGAGAAAATGCT
GATCGACAAACTGAACTACATGGTCGACAAAAAAAGCAATCCGTGTGCAACCGGTGGTGCACTGAAAGGTTATCAGA
TTACCAACAAATTTGAAAGCTTTAAAAGCATGAGCACCCAGAACGGCTTTATCTTCTATATTCCGGCATGGCTGACC
AGCAAAATTGATCCGAGCACCGGTTTTGTGAACCTGCTGAAAACAAAATATACCTCCATTGCCGACAGCAAGAAGTT
TATTAGCAGCTTTGATCGCATTATGTATGTTCCGGAAGAGGACCTGTTTGAATTCGCACTGGATTACAAAAATTTCA
GCCGTACCGATGCCGACTACATCAAAAAATGGAAACTGTACAGCTATGGTAACCGCATTCGCATTTTTCGCAACCCG
AAGAAAAACAATGTGTTCGATTGGGAAGAAGTTTGTCTGACCAGCGCATATAAAGAACTTTTCAACAAATACGGCAT
CAACTATCAGCAGGGTGATATTCGTGCACTGCTGTGTGAACAGAGCGATAAAGCGTTTTATAGCAGTTTTATGGCAC
TGATGAGCCTGATGCTGCAGATGCGTAATAGCATTACCGGTCGCACCGATGTGGATTTTCTGATTAGTCCGGTGAAA
AATTCCGATGGCATCTTTTATGATAGCCGCAATTACGAAGCACAAGAAAATGCAATTCTGCCGAAAAACGCAGATGC
AAATGGTGCATATAACATTGCACGTAAAGTTCTGTGGGCAATTGGCCAGTTTAAGAAAGCAGAAGATGAGAAGCTGG
ACAAAGTGAAAATTGCGATCAGCAATAAAGAGTGGCTGGAATACGCACAGACCAGCGTTAAACATGCGCCAGCGCCT
GCTCCTGCACCCGCTCCAGCACCTGCGATGGTGAGCAAAGGTGAAGAGGATAATATGGCCATCATCAAAGAATTCAT
GCGCTTCAAAGTTCATATGGAAGGTAGCGTTAATGGCCACGAATTTGAAATTGAAGGTGAAGGCGAAGGTCGTCCGT
ATGAAGGCACCCAGACCGCAAAACTGAAAGTTACCAAAGGTGGTCCGCTGCCGTTTGCATGGGATATTCTGAGTCCG
CAGTTTATGTATGGTAGCAAAGCCTATGTTAAACATCCGGCAGATATCCCGGATTATCTGAAACTGAGCTTTCCGGA
AGGTTTTAAATGGGAACGTGTGATGAATTTTGAAGATGGTGGTGTTGTTACCGTTACACAGGATAGCAGCCTGCAGG
ATGGTGAATTTATCTATAAAGTTAAACTGCGTGGCACGAATTTTCCGAGTGATGGTCCGGTTATGCAGAAAAAAACC
ATGGGTTGGGAAGCAAGCAGCGAACGTATGTATCCGGAAGATGGCGCACTGAAAGGTGAAATTAAACAGCGTCTGAA
GCTGAAAGATGGCGGTCATTATGATGCAGAAGTTAAAACCACCTACAAAGCCAAAAAACCGGTTCAGCTGCCTGGTG
CATATAACGTTAACATTAAACTGGATATCACCAGCCACAACGAGGATTATACCATTGTTGAACAGTATGAACGTGCA
GAAGGTCGCCATAGTACCGGTGGTATGGATGAACTGTATAAA
(LbCas12a (E795L)-APAPAPAPAPAPAPA(SEQ ID NO: 16)-
mCherry chimera DNA sequence)
SEQ ID NO: 422
ATGAGCAAACTGGAAAAGTTCACCAACTGTTATAGCCTGAGCAAAACCCTGCGTTTTAAAGCAATTCCGGTTGGTAA
AACCCAAGAGAACATTGATAATAAACGCCTGCTGGTCGAAGATGAAAAACGCGCTGAAGATTATAAAGGCGTGAAAA
AACTGCTGGATCGCTATTATCTGAGCTTCATTAACGATGTGCTGCACAGCATTAAACTGAAGAACCTGAACAACTAT
ATCAGCCTGTTTCGTAAAAAAACCCGCACCGAAAAAGAAAACAAAGAGCTGGAAAACCTGGAAATCAATCTGCGTAA
AGAAATCGCCAAAGCGTTTAAAGGTAACGAGGGTTATAAAAGCCTGTTCAAGAAAGACATCATCGAAACCATTCTGC
CGGAATTTCTGGATGATAAAGATGAAATTGCCCTGGTGAATAGCTTTAATGGCTTTACCACCGCATTTACCGGCTTT
TTTGATAATCGCGAAAACATGTTCAGCGAAGAAGCAAAAAGCACCAGCATTGCATTTCGCTGCATTAATGAAAATCT
GACCCGCTACATTAGCAACATGGATATCTTTGAAAAAGTGGACGCGATCTTCGATAAACACGAAGTGCAAGAGATCA
AAGAGAAAATCCTGAACAGCGATTATGACGTCGAAGATTTTTTTGAAGGCGAGTTCTTTAACTTCGTTCTGACCCAA
GAAGGTATCGACGTTTATAACGCAATTATTGGTGGTTTTGTTACCGAAAGCGGTGAGAAAATCAAAGGCCTGAATGA
ATATATCAACCTGTATAACCAGAAAACCAAACAGAAACTGCCGAAATTCAAACCGCTGTATAAACAGGTTCTGAGCG
ATCGTGAAAGCCTGAGCTTTTATGGTGAAGGTTATACCAGTGATGAAGAGGTTCTGGAAGTTTTTCGTAACACCCTG
AATAAAAACAGCGAGATCTTTAGCAGCATCAAAAAGCTTGAGAAACTGTTCAAAAACTTTGATGAGTATAGCAGCGC
AGGCATCTTTGTTAAAAATGGTCCGGCAATTAGCACCATCAGCAAAGATATTTTTGGCGAATGGAATGTGATCCGCG
ATAAATGGAATGCCGAATATGATGATATCCACCTGAAAAAAAAGGCCGTGGTGACCGAGAAATATGAAGATGATCGT
CGTAAAAGCTTCAAGAAAATTGGTAGCTTTAGCCTGGAACAGCTGCAAGAATATGCAGATGCAGATCTGAGCGTTGT
GGAAAAACTGAAAGAAATCATCATTCAGAAGGTGGACGAGATCTATAAAGTTTATGGTAGCAGCGAAAAACTGTTCG
ATGCAGATTTTGTTCTGGAAAAAAGCCTGAAAAAGAATGATGCCGTTGTGGCCATTATGAAAGATCTGCTGGATAGC
GTTAAGAGCTTCGAGAATTACATCAAAGCCTTTTTTGGTGAGGGCAAAGAAACCAATCGTGATGAAAGTTTCTATGG
CGATTTTGTGCTGGCCTATGATATTCTGCTGAAAGTGGACCATATTTATGATGCCATTCGCAATTATGTTACCCAGA
AACCGTATAGCAAAGACAAGTTCAAACTGTACTTTCAGAACCCGCAGTTTATGGGTGGTTGGGATAAAGATAAAGAA
ACCGATTATCGTGCCACCATCCTGCGTTATGGTAGTAAATACTATCTGGCCATCATGGACAAAAAATACGCAAAATG
CCTGCAGAAAATCGACAAAGATGATGTGAATGGCAACTATGAAAAAATCAACTACAAACTGCTGCCTGGTCCGAATA
AAATGCTGCCGAAAGTGTTCTTTAGCAAGAAATGGATGGCCTATTATAACCCGAGCGAGGATATTCAAAAGATCTAC
AAAAATGGCACCTTTAAAAAGGGCGACATGTTCAATCTGAACGATTGCCACAAACTGATCGATTTCTTCAAAGATTC
AATTTCGCGTTATCCGAAATGGTCCAATGCCTATGATTTTAACTTTAGCGAAACCGAAAAATACAAAGACATTGCCG
GTTTTTATCGCGAAGTGGAAGAACAGGGCTATAAAGTGAGCTTTGAAAGCGCAAGCAAAAAAGAGGTTGATAAGCTG
GTTGAAGAGGGCAAACTGTATATGTTCCAGATTTACAACAAAGATTTTAGCGACAAAAGCCATGGCACCCCGAATCT
GCATACCATGTACTTTAAACTGCTGTTCGACGAAAATAACCATGGTCAGATTCGTCTGAGCGGTGGTGCCGAACTGT
TTATGCGTCGTGCAAGTCTGAAAAAAGAAGAACTGGTTGTTCATCCGGCAAATAGCCCGATTGCAAACAAAAATCCG
GACAATCCGAAAAAAACCACGACACTGAGCTATGATGTGTATAAAGACAAACGTTTTAGCGAGGATCAGTATCTGCT
GCATATCCCGATTGCCATCAATAAATGCCCGAAAAACATCTTTAAGATCAACACCGAAGTTCGCGTGCTGCTGAAAC
ATGATGATAATCCGTATGTGATTGGCATTGATCGTGGTGAACGTAACCTGCTGTATATTGTTGTTGTTGATGGTAAA
GGCAACATCGTGGAACAGTATAGTCTGAACGAAATTATCAACAACTTTAACGGCATCCGCATCAAAACCGACTATCA
TAGCCTGCTGGACAAGAAAGAAAAAGAACGTTTTGAAGCACGTCAGAACTGGACCAGTATTGAAAACATCAAAGAAC
TGAAAGCCGGTTATATTAGCCAGGTGGTTCATAAAATCTGTGAGCTGGTAGAAAAATACGATGCAGTTATTGCACTG
GAAGATCTGAATAGCGGTTTCAAAAATAGCCGTGTGAAAGTCGAAAAACAGGTGTATCAGAAATTCGAGAAAATGCT
GATCGACAAACTGAACTACATGGTCGACAAAAAAAGCAATCCGTGTGCAACCGGTGGTGCACTGAAAGGTTATCAGA
TTACCAACAAATTTGAAAGCTTTAAAAGCATGAGCACCCAGAACGGCTTTATCTTCTATATTCCGGCATGGCTGACC
AGCAAAATTGATCCGAGCACCGGTTTTGTGAACCTGCTGAAAACAAAATATACCTCCATTGCCGACAGCAAGAAGTT
TATTAGCAGCTTTGATCGCATTATGTATGTTCCGGAAGAGGACCTGTTTGAATTCGCACTGGATTACAAAAATTTCA
GCCGTACCGATGCCGACTACATCAAAAAATGGAAACTGTACAGCTATGGTAACCGCATTCGCATTTTTCGCAACCCG
AAGAAAAACAATGTGTTCGATTGGGAAGAAGTTTGTCTGACCAGCGCATATAAAGAACTTTTCAACAAATACGGCAT
CAACTATCAGCAGGGTGATATTCGTGCACTGCTGTGTGAACAGAGCGATAAAGCGTTTTATAGCAGTTTTATGGCAC
TGATGAGCCTGATGCTGCAGATGCGTAATAGCATTACCGGTCGCACCGATGTGGATTTTCTGATTAGTCCGGTGAAA
AATTCCGATGGCATCTTTTATGATAGCCGCAATTACGAAGCACAAGAAAATGCAATTCTGCCGAAAAACGCAGATGC
AAATGGTGCATATAACATTGCACGTAAAGTTCTGTGGGCAATTGGCCAGTTTAAGAAAGCAGAAGATGAGAAGCTGG
ACAAAGTGAAAATTGCGATCAGCAATAAAGAGTGGCTGGAATACGCACAGACCAGCGTTAAACATGCGCCAGCGCCT
GCTCCTGCACCCGCTCCAGCTCCTGCCCCAGCGATGGTGAGCAAAGGTGAAGAGGATAATATGGCCATCATCAAAGA
ATTCATGCGCTTCAAAGTTCATATGGAAGGTAGCGTTAATGGCCACGAATTTGAAATTGAAGGTGAAGGCGAAGGTC
GTCCGTATGAAGGCACCCAGACCGCAAAACTGAAAGTTACCAAAGGTGGTCCGCTGCCGTTTGCATGGGATATTCTG
AGTCCGCAGTTTATGTATGGTAGCAAAGCCTATGTTAAACATCCGGCAGATATCCCGGATTATCTGAAACTGAGCTT
TCCGGAAGGTTTTAAATGGGAACGTGTGATGAATTTTGAAGATGGTGGTGTTGTTACCGTTACACAGGATAGCAGCC
TGCAGGATGGTGAATTTATCTATAAAGTTAAACTGCGTGGCACGAATTTTCCGAGTGATGGTCCGGTTATGCAGAAA
AAAACCATGGGTTGGGAAGCAAGCAGCGAACGTATGTATCCGGAAGATGGCGCACTGAAAGGTGAAATTAAACAGCG
TCTGAAGCTGAAAGATGGCGGTCATTATGATGCAGAAGTTAAAACCACCTACAAAGCCAAAAAACCGGTTCAGCTGC
CTGGTGCATATAACGTTAACATTAAACTGGATATCACCAGCCACAACGAGGATTATACCATTGTTGAACAGTATGAA
CGTGCAGAAGGTCGCCATAGTACCGGTGGTATGGATGAACTGTATAAA
(LbCas12a (E795L)-APAPAPAPAPAPAPAPA(SEQ ID NO: 17)-
mCherry chimera DNA sequence)
SEQ ID NO: 423
ATGAGCAAACTGGAAAAGTTCACCAACTGTTATAGCCTGAGCAAAACCCTGCGTTTTAAAGCAATTCCGGTTGGTAA
AACCCAAGAGAACATTGATAATAAACGCCTGCTGGTCGAAGATGAAAAACGCGCTGAAGATTATAAAGGCGTGAAAA
AACTGCTGGATCGCTATTATCTGAGCTTCATTAACGATGTGCTGCACAGCATTAAACTGAAGAACCTGAACAACTAT
ATCAGCCTGTTTCGTAAAAAAACCCGCACCGAAAAAGAAAACAAAGAGCTGGAAAACCTGGAAATCAATCTGCGTAA
AGAAATCGCCAAAGCGTTTAAAGGTAACGAGGGTTATAAAAGCCTGTTCAAGAAAGACATCATCGAAACCATTCTGC
CGGAATTTCTGGATGATAAAGATGAAATTGCCCTGGTGAATAGCTTTAATGGCTTTACCACCGCATTTACCGGCTTT
TTTGATAATCGCGAAAACATGTTCAGCGAAGAAGCAAAAAGCACCAGCATTGCATTTCGCTGCATTAATGAAAATCT
GACCCGCTACATTAGCAACATGGATATCTTTGAAAAAGTGGACGCGATCTTCGATAAACACGAAGTGCAAGAGATCA
AAGAGAAAATCCTGAACAGCGATTATGACGTCGAAGATTTTTTTGAAGGCGAGTTCTTTAACTTCGTTCTGACCCAA
GAAGGTATCGACGTTTATAACGCAATTATTGGTGGTTTTGTTACCGAAAGCGGTGAGAAAATCAAAGGCCTGAATGA
ATATATCAACCTGTATAACCAGAAAACCAAACAGAAACTGCCGAAATTCAAACCGCTGTATAAACAGGTTCTGAGCG
ATCGTGAAAGCCTGAGCTTTTATGGTGAAGGTTATACCAGTGATGAAGAGGTTCTGGAAGTTTTTCGTAACACCCTG
AATAAAAACAGCGAGATCTTTAGCAGCATCAAAAAGCTTGAGAAACTGTTCAAAAACTTTGATGAGTATAGCAGCGC
AGGCATCTTTGTTAAAAATGGTCCGGCAATTAGCACCATCAGCAAAGATATTTTTGGCGAATGGAATGTGATCCGCG
ATAAATGGAATGCCGAATATGATGATATCCACCTGAAAAAAAAGGCCGTGGTGACCGAGAAATATGAAGATGATCGT
CGTAAAAGCTTCAAGAAAATTGGTAGCTTTAGCCTGGAACAGCTGCAAGAATATGCAGATGCAGATCTGAGCGTTGT
GGAAAAACTGAAAGAAATCATCATTCAGAAGGTGGACGAGATCTATAAAGTTTATGGTAGCAGCGAAAAACTGTTCG
ATGCAGATTTTGTTCTGGAAAAAAGCCTGAAAAAGAATGATGCCGTTGTGGCCATTATGAAAGATCTGCTGGATAGC
GTTAAGAGCTTCGAGAATTACATCAAAGCCTTTTTTGGTGAGGGCAAAGAAACCAATCGTGATGAAAGTTTCTATGG
CGATTTTGTGCTGGCCTATGATATTCTGCTGAAAGTGGACCATATTTATGATGCCATTCGCAATTATGTTACCCAGA
AACCGTATAGCAAAGACAAGTTCAAACTGTACTTTCAGAACCCGCAGTTTATGGGTGGTTGGGATAAAGATAAAGAA
ACCGATTATCGTGCCACCATCCTGCGTTATGGTAGTAAATACTATCTGGCCATCATGGACAAAAAATACGCAAAATG
CCTGCAGAAAATCGACAAAGATGATGTGAATGGCAACTATGAAAAAATCAACTACAAACTGCTGCCTGGTCCGAATA
AAATGCTGCCGAAAGTGTTCTTTAGCAAGAAATGGATGGCCTATTATAACCCGAGCGAGGATATTCAAAAGATCTAC
AAAAATGGCACCTTTAAAAAGGGCGACATGTTCAATCTGAACGATTGCCACAAACTGATCGATTTCTTCAAAGATTC
AATTTCGCGTTATCCGAAATGGTCCAATGCCTATGATTTTAACTTTAGCGAAACCGAAAAATACAAAGACATTGCCG
GTTTTTATCGCGAAGTGGAAGAACAGGGCTATAAAGTGAGCTTTGAAAGCGCAAGCAAAAAAGAGGTTGATAAGCTG
GTTGAAGAGGGCAAACTGTATATGTTCCAGATTTACAACAAAGATTTTAGCGACAAAAGCCATGGCACCCCGAATCT
GCATACCATGTACTTTAAACTGCTGTTCGACGAAAATAACCATGGTCAGATTCGTCTGAGCGGTGGTGCCGAACTGT
TTATGCGTCGTGCAAGTCTGAAAAAAGAAGAACTGGTTGTTCATCCGGCAAATAGCCCGATTGCAAACAAAAATCCG
GACAATCCGAAAAAAACCACGACACTGAGCTATGATGTGTATAAAGACAAACGTTTTAGCGAGGATCAGTATCTGCT
GCATATCCCGATTGCCATCAATAAATGCCCGAAAAACATCTTTAAGATCAACACCGAAGTTCGCGTGCTGCTGAAAC
ATGATGATAATCCGTATGTGATTGGCATTGATCGTGGTGAACGTAACCTGCTGTATATTGTTGTTGTTGATGGTAAA
GGCAACATCGTGGAACAGTATAGTCTGAACGAAATTATCAACAACTTTAACGGCATCCGCATCAAAACCGACTATCA
TAGCCTGCTGGACAAGAAAGAAAAAGAACGTTTTGAAGCACGTCAGAACTGGACCAGTATTGAAAACATCAAAGAAC
TGAAAGCCGGTTATATTAGCCAGGTGGTTCATAAAATCTGTGAGCTGGTAGAAAAATACGATGCAGTTATTGCACTG
GAAGATCTGAATAGCGGTTTCAAAAATAGCCGTGTGAAAGTCGAAAAACAGGTGTATCAGAAATTCGAGAAAATGCT
GATCGACAAACTGAACTACATGGTCGACAAAAAAAGCAATCCGTGTGCAACCGGTGGTGCACTGAAAGGTTATCAGA
TTACCAACAAATTTGAAAGCTTTAAAAGCATGAGCACCCAGAACGGCTTTATCTTCTATATTCCGGCATGGCTGACC
AGCAAAATTGATCCGAGCACCGGTTTTGTGAACCTGCTGAAAACAAAATATACCTCCATTGCCGACAGCAAGAAGTT
TATTAGCAGCTTTGATCGCATTATGTATGTTCCGGAAGAGGACCTGTTTGAATTCGCACTGGATTACAAAAATTTCA
GCCGTACCGATGCCGACTACATCAAAAAATGGAAACTGTACAGCTATGGTAACCGCATTCGCATTTTTCGCAACCCG
AAGAAAAACAATGTGTTCGATTGGGAAGAAGTTTGTCTGACCAGCGCATATAAAGAACTTTTCAACAAATACGGCAT
CAACTATCAGCAGGGTGATATTCGTGCACTGCTGTGTGAACAGAGCGATAAAGCGTTTTATAGCAGTTTTATGGCAC
TGATGAGCCTGATGCTGCAGATGCGTAATAGCATTACCGGTCGCACCGATGTGGATTTTCTGATTAGTCCGGTGAAA
AATTCCGATGGCATCTTTTATGATAGCCGCAATTACGAAGCACAAGAAAATGCAATTCTGCCGAAAAACGCAGATGC
AAATGGTGCATATAACATTGCACGTAAAGTTCTGTGGGCAATTGGCCAGTTTAAGAAAGCAGAAGATGAGAAGCTGG
ACAAAGTGAAAATTGCGATCAGCAATAAAGAGTGGCTGGAATACGCACAGACCAGCGTTAAACATGCGCCAGCGCCT
GCTCCTGCACCCGCTCCAGCGCCAGCTCCTGCACCTGCGATGGTGAGCAAAGGTGAAGAGGATAATATGGCCATCAT
CAAAGAATTCATGCGCTTCAAAGTTCATATGGAAGGTAGCGTTAATGGCCACGAATTTGAAATTGAAGGTGAAGGCG
AAGGTCGTCCGTATGAAGGCACCCAGACCGCAAAACTGAAAGTTACCAAAGGTGGTCCGCTGCCGTTTGCATGGGAT
ATTCTGAGTCCGCAGTTTATGTATGGTAGCAAAGCCTATGTTAAACATCCGGCAGATATCCCGGATTATCTGAAACT
GAGCTTTCCGGAAGGTTTTAAATGGGAACGTGTGATGAATTTTGAAGATGGTGGTGTTGTTACCGTTACACAGGATA
GCAGCCTGCAGGATGGTGAATTTATCTATAAAGTTAAACTGCGTGGCACGAATTTTCCGAGTGATGGTCCGGTTATG
CAGAAAAAAACCATGGGTTGGGAAGCAAGCAGCGAACGTATGTATCCGGAAGATGGCGCACTGAAAGGTGAAATTAA
ACAGCGTCTGAAGCTGAAAGATGGCGGTCATTATGATGCAGAAGTTAAAACCACCTACAAAGCCAAAAAACCGGTTC
AGCTGCCTGGTGCATATAACGTTAACATTAAACTGGATATCACCAGCCACAACGAGGATTATACCATTGTTGAACAG
TATGAACGTGCAGAAGGTCGCCATAGTACCGGTGGTATGGATGAACTGTATAAA
(LbCas12a (E795L)-APAPAPAPAPAPAPAPAPA-(SEQ ID NO: 18)
mCherry chimera DNA sequence)
SEQ ID NO: 424
ATGAGCAAACTGGAAAAGTTCACCAACTGTTATAGCCTGAGCAAAACCCTGCGTTTTAAAGCAATTCCGGTTGGTAA
AACCCAAGAGAACATTGATAATAAACGCCTGCTGGTCGAAGATGAAAAACGCGCTGAAGATTATAAAGGCGTGAAAA
AACTGCTGGATCGCTATTATCTGAGCTTCATTAACGATGTGCTGCACAGCATTAAACTGAAGAACCTGAACAACTAT
ATCAGCCTGTTTCGTAAAAAAACCCGCACCGAAAAAGAAAACAAAGAGCTGGAAAACCTGGAAATCAATCTGCGTAA
AGAAATCGCCAAAGCGTTTAAAGGTAACGAGGGTTATAAAAGCCTGTTCAAGAAAGACATCATCGAAACCATTCTGC
CGGAATTTCTGGATGATAAAGATGAAATTGCCCTGGTGAATAGCTTTAATGGCTTTACCACCGCATTTACCGGCTTT
TTTGATAATCGCGAAAACATGTTCAGCGAAGAAGCAAAAAGCACCAGCATTGCATTTCGCTGCATTAATGAAAATCT
GACCCGCTACATTAGCAACATGGATATCTTTGAAAAAGTGGACGCGATCTTCGATAAACACGAAGTGCAAGAGATCA
AAGAGAAAATCCTGAACAGCGATTATGACGTCGAAGATTTTTTTGAAGGCGAGTTCTTTAACTTCGTTCTGACCCAA
GAAGGTATCGACGTTTATAACGCAATTATTGGTGGTTTTGTTACCGAAAGCGGTGAGAAAATCAAAGGCCTGAATGA
ATATATCAACCTGTATAACCAGAAAACCAAACAGAAACTGCCGAAATTCAAACCGCTGTATAAACAGGTTCTGAGCG
ATCGTGAAAGCCTGAGCTTTTATGGTGAAGGTTATACCAGTGATGAAGAGGTTCTGGAAGTTTTTCGTAACACCCTG
AATAAAAACAGCGAGATCTTTAGCAGCATCAAAAAGCTTGAGAAACTGTTCAAAAACTTTGATGAGTATAGCAGCGC
AGGCATCTTTGTTAAAAATGGTCCGGCAATTAGCACCATCAGCAAAGATATTTTTGGCGAATGGAATGTGATCCGCG
ATAAATGGAATGCCGAATATGATGATATCCACCTGAAAAAAAAGGCCGTGGTGACCGAGAAATATGAAGATGATCGT
CGTAAAAGCTTCAAGAAAATTGGTAGCTTTAGCCTGGAACAGCTGCAAGAATATGCAGATGCAGATCTGAGCGTTGT
GGAAAAACTGAAAGAAATCATCATTCAGAAGGTGGACGAGATCTATAAAGTTTATGGTAGCAGCGAAAAACTGTTCG
ATGCAGATTTTGTTCTGGAAAAAAGCCTGAAAAAGAATGATGCCGTTGTGGCCATTATGAAAGATCTGCTGGATAGC
GTTAAGAGCTTCGAGAATTACATCAAAGCCTTTTTTGGTGAGGGCAAAGAAACCAATCGTGATGAAAGTTTCTATGG
CGATTTTGTGCTGGCCTATGATATTCTGCTGAAAGTGGACCATATTTATGATGCCATTCGCAATTATGTTACCCAGA
AACCGTATAGCAAAGACAAGTTCAAACTGTACTTTCAGAACCCGCAGTTTATGGGTGGTTGGGATAAAGATAAAGAA
ACCGATTATCGTGCCACCATCCTGCGTTATGGTAGTAAATACTATCTGGCCATCATGGACAAAAAATACGCAAAATG
CCTGCAGAAAATCGACAAAGATGATGTGAATGGCAACTATGAAAAAATCAACTACAAACTGCTGCCTGGTCCGAATA
AAATGCTGCCGAAAGTGTTCTTTAGCAAGAAATGGATGGCCTATTATAACCCGAGCGAGGATATTCAAAAGATCTAC
AAAAATGGCACCTTTAAAAAGGGCGACATGTTCAATCTGAACGATTGCCACAAACTGATCGATTTCTTCAAAGATTC
AATTTCGCGTTATCCGAAATGGTCCAATGCCTATGATTTTAACTTTAGCGAAACCGAAAAATACAAAGACATTGCCG
GTTTTTATCGCGAAGTGGAAGAACAGGGCTATAAAGTGAGCTTTGAAAGCGCAAGCAAAAAAGAGGTTGATAAGCTG
GTTGAAGAGGGCAAACTGTATATGTTCCAGATTTACAACAAAGATTTTAGCGACAAAAGCCATGGCACCCCGAATCT
GCATACCATGTACTTTAAACTGCTGTTCGACGAAAATAACCATGGTCAGATTCGTCTGAGCGGTGGTGCCGAACTGT
TTATGCGTCGTGCAAGTCTGAAAAAAGAAGAACTGGTTGTTCATCCGGCAAATAGCCCGATTGCAAACAAAAATCCG
GACAATCCGAAAAAAACCACGACACTGAGCTATGATGTGTATAAAGACAAACGTTTTAGCGAGGATCAGTATCTGCT
GCATATCCCGATTGCCATCAATAAATGCCCGAAAAACATCTTTAAGATCAACACCGAAGTTCGCGTGCTGCTGAAAC
ATGATGATAATCCGTATGTGATTGGCATTGATCGTGGTGAACGTAACCTGCTGTATATTGTTGTTGTTGATGGTAAA
GGCAACATCGTGGAACAGTATAGTCTGAACGAAATTATCAACAACTTTAACGGCATCCGCATCAAAACCGACTATCA
TAGCCTGCTGGACAAGAAAGAAAAAGAACGTTTTGAAGCACGTCAGAACTGGACCAGTATTGAAAACATCAAAGAAC
TGAAAGCCGGTTATATTAGCCAGGTGGTTCATAAAATCTGTGAGCTGGTAGAAAAATACGATGCAGTTATTGCACTG
GAAGATCTGAATAGCGGTTTCAAAAATAGCCGTGTGAAAGTCGAAAAACAGGTGTATCAGAAATTCGAGAAAATGCT
GATCGACAAACTGAACTACATGGTCGACAAAAAAAGCAATCCGTGTGCAACCGGTGGTGCACTGAAAGGTTATCAGA
TTACCAACAAATTTGAAAGCTTTAAAAGCATGAGCACCCAGAACGGCTTTATCTTCTATATTCCGGCATGGCTGACC
AGCAAAATTGATCCGAGCACCGGTTTTGTGAACCTGCTGAAAACAAAATATACCTCCATTGCCGACAGCAAGAAGTT
TATTAGCAGCTTTGATCGCATTATGTATGTTCCGGAAGAGGACCTGTTTGAATTCGCACTGGATTACAAAAATTTCA
GCCGTACCGATGCCGACTACATCAAAAAATGGAAACTGTACAGCTATGGTAACCGCATTCGCATTTTTCGCAACCCG
AAGAAAAACAATGTGTTCGATTGGGAAGAAGTTTGTCTGACCAGCGCATATAAAGAACTTTTCAACAAATACGGCAT
CAACTATCAGCAGGGTGATATTCGTGCACTGCTGTGTGAACAGAGCGATAAAGCGTTTTATAGCAGTTTTATGGCAC
TGATGAGCCTGATGCTGCAGATGCGTAATAGCATTACCGGTCGCACCGATGTGGATTTTCTGATTAGTCCGGTGAAA
AATTCCGATGGCATCTTTTATGATAGCCGCAATTACGAAGCACAAGAAAATGCAATTCTGCCGAAAAACGCAGATGC
AAATGGTGCATATAACATTGCACGTAAAGTTCTGTGGGCAATTGGCCAGTTTAAGAAAGCAGAAGATGAGAAGCTGG
ACAAAGTGAAAATTGCGATCAGCAATAAAGAGTGGCTGGAATACGCACAGACCAGCGTTAAACATGCGCCAGCGCCT
GCTCCTGCACCCGCTCCAGCTCCTGCGCCAGCTCCTGCACCTGCGATGGTGAGCAAAGGTGAAGAGGATAATATGGC
CATCATCAAAGAATTCATGCGCTTCAAAGTTCATATGGAAGGTAGCGTTAATGGCCACGAATTTGAAATTGAAGGTG
AAGGCGAAGGTCGTCCGTATGAAGGCACCCAGACCGCAAAACTGAAAGTTACCAAAGGTGGTCCGCTGCCGTTTGCA
TGGGATATTCTGAGTCCGCAGTTTATGTATGGTAGCAAAGCCTATGTTAAACATCCGGCAGATATCCCGGATTATCT
GAAACTGAGCTTTCCGGAAGGTTTTAAATGGGAACGTGTGATGAATTTTGAAGATGGTGGTGTTGTTACCGTTACAC
AGGATAGCAGCCTGCAGGATGGTGAATTTATCTATAAAGTTAAACTGCGTGGCACGAATTTTCCGAGTGATGGTCCG
GTTATGCAGAAAAAAACCATGGGTTGGGAAGCAAGCAGCGAACGTATGTATCCGGAAGATGGCGCACTGAAAGGTGA
AATTAAACAGCGTCTGAAGCTGAAAGATGGCGGTCATTATGATGCAGAAGTTAAAACCACCTACAAAGCCAAAAAAC
CGGTTCAGCTGCCTGGTGCATATAACGTTAACATTAAACTGGATATCACCAGCCACAACGAGGATTATACCATTGTT
GAACAGTATGAACGTGCAGAAGGTCGCCATAGTACCGGTGGTATGGATGAACTGTATAAA
(LbCas12a (E795L)-APAPAPAPAPAPAPAPAPAPA-(SEQ ID NO: 19)
mCherry chimera DNA sequence)
SEQ ID NO: 425
ATGAGCAAACTGGAAAAGTTCACCAACTGTTATAGCCTGAGCAAAACCCTGCGTTTTAAAGCAATTCCGGTTGGTAA
AACCCAAGAGAACATTGATAATAAACGCCTGCTGGTCGAAGATGAAAAACGCGCTGAAGATTATAAAGGCGTGAAAA
AACTGCTGGATCGCTATTATCTGAGCTTCATTAACGATGTGCTGCACAGCATTAAACTGAAGAACCTGAACAACTAT
ATCAGCCTGTTTCGTAAAAAAACCCGCACCGAAAAAGAAAACAAAGAGCTGGAAAACCTGGAAATCAATCTGCGTAA
AGAAATCGCCAAAGCGTTTAAAGGTAACGAGGGTTATAAAAGCCTGTTCAAGAAAGACATCATCGAAACCATTCTGC
CGGAATTTCTGGATGATAAAGATGAAATTGCCCTGGTGAATAGCTTTAATGGCTTTACCACCGCATTTACCGGCTTT
TTTGATAATCGCGAAAACATGTTCAGCGAAGAAGCAAAAAGCACCAGCATTGCATTTCGCTGCATTAATGAAAATCT
GACCCGCTACATTAGCAACATGGATATCTTTGAAAAAGTGGACGCGATCTTCGATAAACACGAAGTGCAAGAGATCA
AAGAGAAAATCCTGAACAGCGATTATGACGTCGAAGATTTTTTTGAAGGCGAGTTCTTTAACTTCGTTCTGACCCAA
GAAGGTATCGACGTTTATAACGCAATTATTGGTGGTTTTGTTACCGAAAGCGGTGAGAAAATCAAAGGCCTGAATGA
ATATATCAACCTGTATAACCAGAAAACCAAACAGAAACTGCCGAAATTCAAACCGCTGTATAAACAGGTTCTGAGCG
ATCGTGAAAGCCTGAGCTTTTATGGTGAAGGTTATACCAGTGATGAAGAGGTTCTGGAAGTTTTTCGTAACACCCTG
AATAAAAACAGCGAGATCTTTAGCAGCATCAAAAAGCTTGAGAAACTGTTCAAAAACTTTGATGAGTATAGCAGCGC
AGGCATCTTTGTTAAAAATGGTCCGGCAATTAGCACCATCAGCAAAGATATTTTTGGCGAATGGAATGTGATCCGCG
ATAAATGGAATGCCGAATATGATGATATCCACCTGAAAAAAAAGGCCGTGGTGACCGAGAAATATGAAGATGATCGT
CGTAAAAGCTTCAAGAAAATTGGTAGCTTTAGCCTGGAACAGCTGCAAGAATATGCAGATGCAGATCTGAGCGTTGT
GGAAAAACTGAAAGAAATCATCATTCAGAAGGTGGACGAGATCTATAAAGTTTATGGTAGCAGCGAAAAACTGTTCG
ATGCAGATTTTGTTCTGGAAAAAAGCCTGAAAAAGAATGATGCCGTTGTGGCCATTATGAAAGATCTGCTGGATAGC
GTTAAGAGCTTCGAGAATTACATCAAAGCCTTTTTTGGTGAGGGCAAAGAAACCAATCGTGATGAAAGTTTCTATGG
CGATTTTGTGCTGGCCTATGATATTCTGCTGAAAGTGGACCATATTTATGATGCCATTCGCAATTATGTTACCCAGA
AACCGTATAGCAAAGACAAGTTCAAACTGTACTTTCAGAACCCGCAGTTTATGGGTGGTTGGGATAAAGATAAAGAA
ACCGATTATCGTGCCACCATCCTGCGTTATGGTAGTAAATACTATCTGGCCATCATGGACAAAAAATACGCAAAATG
CCTGCAGAAAATCGACAAAGATGATGTGAATGGCAACTATGAAAAAATCAACTACAAACTGCTGCCTGGTCCGAATA
AAATGCTGCCGAAAGTGTTCTTTAGCAAGAAATGGATGGCCTATTATAACCCGAGCGAGGATATTCAAAAGATCTAC
AAAAATGGCACCTTTAAAAAGGGCGACATGTTCAATCTGAACGATTGCCACAAACTGATCGATTTCTTCAAAGATTC
AATTTCGCGTTATCCGAAATGGTCCAATGCCTATGATTTTAACTTTAGCGAAACCGAAAAATACAAAGACATTGCCG
GTTTTTATCGCGAAGTGGAAGAACAGGGCTATAAAGTGAGCTTTGAAAGCGCAAGCAAAAAAGAGGTTGATAAGCTG
GTTGAAGAGGGCAAACTGTATATGTTCCAGATTTACAACAAAGATTTTAGCGACAAAAGCCATGGCACCCCGAATCT
GCATACCATGTACTTTAAACTGCTGTTCGACGAAAATAACCATGGTCAGATTCGTCTGAGCGGTGGTGCCGAACTGT
TTATGCGTCGTGCAAGTCTGAAAAAAGAAGAACTGGTTGTTCATCCGGCAAATAGCCCGATTGCAAACAAAAATCCG
GACAATCCGAAAAAAACCACGACACTGAGCTATGATGTGTATAAAGACAAACGTTTTAGCGAGGATCAGTATCTGCT
GCATATCCCGATTGCCATCAATAAATGCCCGAAAAACATCTTTAAGATCAACACCGAAGTTCGCGTGCTGCTGAAAC
ATGATGATAATCCGTATGTGATTGGCATTGATCGTGGTGAACGTAACCTGCTGTATATTGTTGTTGTTGATGGTAAA
GGCAACATCGTGGAACAGTATAGTCTGAACGAAATTATCAACAACTTTAACGGCATCCGCATCAAAACCGACTATCA
TAGCCTGCTGGACAAGAAAGAAAAAGAACGTTTTGAAGCACGTCAGAACTGGACCAGTATTGAAAACATCAAAGAAC
TGAAAGCCGGTTATATTAGCCAGGTGGTTCATAAAATCTGTGAGCTGGTAGAAAAATACGATGCAGTTATTGCACTG
GAAGATCTGAATAGCGGTTTCAAAAATAGCCGTGTGAAAGTCGAAAAACAGGTGTATCAGAAATTCGAGAAAATGCT
GATCGACAAACTGAACTACATGGTCGACAAAAAAAGCAATCCGTGTGCAACCGGTGGTGCACTGAAAGGTTATCAGA
TTACCAACAAATTTGAAAGCTTTAAAAGCATGAGCACCCAGAACGGCTTTATCTTCTATATTCCGGCATGGCTGACC
AGCAAAATTGATCCGAGCACCGGTTTTGTGAACCTGCTGAAAACAAAATATACCTCCATTGCCGACAGCAAGAAGTT
TATTAGCAGCTTTGATCGCATTATGTATGTTCCGGAAGAGGACCTGTTTGAATTCGCACTGGATTACAAAAATTTCA
GCCGTACCGATGCCGACTACATCAAAAAATGGAAACTGTACAGCTATGGTAACCGCATTCGCATTTTTCGCAACCCG
AAGAAAAACAATGTGTTCGATTGGGAAGAAGTTTGTCTGACCAGCGCATATAAAGAACTTTTCAACAAATACGGCAT
CAACTATCAGCAGGGTGATATTCGTGCACTGCTGTGTGAACAGAGCGATAAAGCGTTTTATAGCAGTTTTATGGCAC
TGATGAGCCTGATGCTGCAGATGCGTAATAGCATTACCGGTCGCACCGATGTGGATTTTCTGATTAGTCCGGTGAAA
AATTCCGATGGCATCTTTTATGATAGCCGCAATTACGAAGCACAAGAAAATGCAATTCTGCCGAAAAACGCAGATGC
AAATGGTGCATATAACATTGCACGTAAAGTTCTGTGGGCAATTGGCCAGTTTAAGAAAGCAGAAGATGAGAAGCTGG
ACAAAGTGAAAATTGCGATCAGCAATAAAGAGTGGCTGGAATACGCACAGACCAGCGTTAAACATGCGCCAGCGCCT
GCTCCTGCACCCGCTCCAGCTCCTGCTCCTGCGCCAGCTCCTGCACCTGCGATGGTGAGCAAAGGTGAAGAGGATAA
TATGGCCATCATCAAAGAATTCATGCGCTTCAAAGTTCATATGGAAGGTAGCGTTAATGGCCACGAATTTGAAATTG
AAGGTGAAGGCGAAGGTCGTCCGTATGAAGGCACCCAGACCGCAAAACTGAAAGTTACCAAAGGTGGTCCGCTGCCG
TTTGCATGGGATATTCTGAGTCCGCAGTTTATGTATGGTAGCAAAGCCTATGTTAAACATCCGGCAGATATCCCGGA
TTATCTGAAACTGAGCTTTCCGGAAGGTTTTAAATGGGAACGTGTGATGAATTTTGAAGATGGTGGTGTTGTTACCG
TTACACAGGATAGCAGCCTGCAGGATGGTGAATTTATCTATAAAGTTAAACTGCGTGGCACGAATTTTCCGAGTGAT
GGTCCGGTTATGCAGAAAAAAACCATGGGTTGGGAAGCAAGCAGCGAACGTATGTATCCGGAAGATGGCGCACTGAA
AGGTGAAATTAAACAGCGTCTGAAGCTGAAAGATGGCGGTCATTATGATGCAGAAGTTAAAACCACCTACAAAGCCA
AAAAACCGGTTCAGCTGCCTGGTGCATATAACGTTAACATTAAACTGGATATCACCAGCCACAACGAGGATTATACC
ATTGTTGAACAGTATGAACGTGCAGAAGGTCGCCATAGTACCGGTGGTATGGATGAACTGTATAAA
(LbCas12a (E795L)-APAPAPAPAPAPAPAPAPAPAPA(SEQ ID NO: 20)-
mCherry chimera DNA sequence)
SEQ ID NO: 426
ATGAGCAAACTGGAAAAGTTCACCAACTGTTATAGCCTGAGCAAAACCCTGCGTTTTAAAGCAATTCCGGTTGGTAA
AACCCAAGAGAACATTGATAATAAACGCCTGCTGGTCGAAGATGAAAAACGCGCTGAAGATTATAAAGGCGTGAAAA
AACTGCTGGATCGCTATTATCTGAGCTTCATTAACGATGTGCTGCACAGCATTAAACTGAAGAACCTGAACAACTAT
ATCAGCCTGTTTCGTAAAAAAACCCGCACCGAAAAAGAAAACAAAGAGCTGGAAAACCTGGAAATCAATCTGCGTAA
AGAAATCGCCAAAGCGTTTAAAGGTAACGAGGGTTATAAAAGCCTGTTCAAGAAAGACATCATCGAAACCATTCTGC
CGGAATTTCTGGATGATAAAGATGAAATTGCCCTGGTGAATAGCTTTAATGGCTTTACCACCGCATTTACCGGCTTT
TTTGATAATCGCGAAAACATGTTCAGCGAAGAAGCAAAAAGCACCAGCATTGCATTTCGCTGCATTAATGAAAATCT
GACCCGCTACATTAGCAACATGGATATCTTTGAAAAAGTGGACGCGATCTTCGATAAACACGAAGTGCAAGAGATCA
AAGAGAAAATCCTGAACAGCGATTATGACGTCGAAGATTTTTTTGAAGGCGAGTTCTTTAACTTCGTTCTGACCCAA
GAAGGTATCGACGTTTATAACGCAATTATTGGTGGTTTTGTTACCGAAAGCGGTGAGAAAATCAAAGGCCTGAATGA
ATATATCAACCTGTATAACCAGAAAACCAAACAGAAACTGCCGAAATTCAAACCGCTGTATAAACAGGTTCTGAGCG
ATCGTGAAAGCCTGAGCTTTTATGGTGAAGGTTATACCAGTGATGAAGAGGTTCTGGAAGTTTTTCGTAACACCCTG
AATAAAAACAGCGAGATCTTTAGCAGCATCAAAAAGCTTGAGAAACTGTTCAAAAACTTTGATGAGTATAGCAGCGC
AGGCATCTTTGTTAAAAATGGTCCGGCAATTAGCACCATCAGCAAAGATATTTTTGGCGAATGGAATGTGATCCGCG
ATAAATGGAATGCCGAATATGATGATATCCACCTGAAAAAAAAGGCCGTGGTGACCGAGAAATATGAAGATGATCGT
CGTAAAAGCTTCAAGAAAATTGGTAGCTTTAGCCTGGAACAGCTGCAAGAATATGCAGATGCAGATCTGAGCGTTGT
GGAAAAACTGAAAGAAATCATCATTCAGAAGGTGGACGAGATCTATAAAGTTTATGGTAGCAGCGAAAAACTGTTCG
ATGCAGATTTTGTTCTGGAAAAAAGCCTGAAAAAGAATGATGCCGTTGTGGCCATTATGAAAGATCTGCTGGATAGC
GTTAAGAGCTTCGAGAATTACATCAAAGCCTTTTTTGGTGAGGGCAAAGAAACCAATCGTGATGAAAGTTTCTATGG
CGATTTTGTGCTGGCCTATGATATTCTGCTGAAAGTGGACCATATTTATGATGCCATTCGCAATTATGTTACCCAGA
AACCGTATAGCAAAGACAAGTTCAAACTGTACTTTCAGAACCCGCAGTTTATGGGTGGTTGGGATAAAGATAAAGAA
ACCGATTATCGTGCCACCATCCTGCGTTATGGTAGTAAATACTATCTGGCCATCATGGACAAAAAATACGCAAAATG
CCTGCAGAAAATCGACAAAGATGATGTGAATGGCAACTATGAAAAAATCAACTACAAACTGCTGCCTGGTCCGAATA
AAATGCTGCCGAAAGTGTTCTTTAGCAAGAAATGGATGGCCTATTATAACCCGAGCGAGGATATTCAAAAGATCTAC
AAAAATGGCACCTTTAAAAAGGGCGACATGTTCAATCTGAACGATTGCCACAAACTGATCGATTTCTTCAAAGATTC
AATTTCGCGTTATCCGAAATGGTCCAATGCCTATGATTTTAACTTTAGCGAAACCGAAAAATACAAAGACATTGCCG
GTTTTTATCGCGAAGTGGAAGAACAGGGCTATAAAGTGAGCTTTGAAAGCGCAAGCAAAAAAGAGGTTGATAAGCTG
GTTGAAGAGGGCAAACTGTATATGTTCCAGATTTACAACAAAGATTTTAGCGACAAAAGCCATGGCACCCCGAATCT
GCATACCATGTACTTTAAACTGCTGTTCGACGAAAATAACCATGGTCAGATTCGTCTGAGCGGTGGTGCCGAACTGT
TTATGCGTCGTGCAAGTCTGAAAAAAGAAGAACTGGTTGTTCATCCGGCAAATAGCCCGATTGCAAACAAAAATCCG
GACAATCCGAAAAAAACCACGACACTGAGCTATGATGTGTATAAAGACAAACGTTTTAGCGAGGATCAGTATCTGCT
GCATATCCCGATTGCCATCAATAAATGCCCGAAAAACATCTTTAAGATCAACACCGAAGTTCGCGTGCTGCTGAAAC
ATGATGATAATCCGTATGTGATTGGCATTGATCGTGGTGAACGTAACCTGCTGTATATTGTTGTTGTTGATGGTAAA
GGCAACATCGTGGAACAGTATAGTCTGAACGAAATTATCAACAACTTTAACGGCATCCGCATCAAAACCGACTATCA
TAGCCTGCTGGACAAGAAAGAAAAAGAACGTTTTGAAGCACGTCAGAACTGGACCAGTATTGAAAACATCAAAGAAC
TGAAAGCCGGTTATATTAGCCAGGTGGTTCATAAAATCTGTGAGCTGGTAGAAAAATACGATGCAGTTATTGCACTG
GAAGATCTGAATAGCGGTTTCAAAAATAGCCGTGTGAAAGTCGAAAAACAGGTGTATCAGAAATTCGAGAAAATGCT
GATCGACAAACTGAACTACATGGTCGACAAAAAAAGCAATCCGTGTGCAACCGGTGGTGCACTGAAAGGTTATCAGA
TTACCAACAAATTTGAAAGCTTTAAAAGCATGAGCACCCAGAACGGCTTTATCTTCTATATTCCGGCATGGCTGACC
AGCAAAATTGATCCGAGCACCGGTTTTGTGAACCTGCTGAAAACAAAATATACCTCCATTGCCGACAGCAAGAAGTT
TATTAGCAGCTTTGATCGCATTATGTATGTTCCGGAAGAGGACCTGTTTGAATTCGCACTGGATTACAAAAATTTCA
GCCGTACCGATGCCGACTACATCAAAAAATGGAAACTGTACAGCTATGGTAACCGCATTCGCATTTTTCGCAACCCG
AAGAAAAACAATGTGTTCGATTGGGAAGAAGTTTGTCTGACCAGCGCATATAAAGAACTTTTCAACAAATACGGCAT
CAACTATCAGCAGGGTGATATTCGTGCACTGCTGTGTGAACAGAGCGATAAAGCGTTTTATAGCAGTTTTATGGCAC
TGATGAGCCTGATGCTGCAGATGCGTAATAGCATTACCGGTCGCACCGATGTGGATTTTCTGATTAGTCCGGTGAAA
AATTCCGATGGCATCTTTTATGATAGCCGCAATTACGAAGCACAAGAAAATGCAATTCTGCCGAAAAACGCAGATGC
AAATGGTGCATATAACATTGCACGTAAAGTTCTGTGGGCAATTGGCCAGTTTAAGAAAGCAGAAGATGAGAAGCTGG
ACAAAGTGAAAATTGCGATCAGCAATAAAGAGTGGCTGGAATACGCACAGACCAGCGTTAAACATGCGCCAGCGCCT
GCTCCTGCACCCGCTCCAGCTCCTGCCCCAGCTCCAGCGCCCGCTCCTGCACCTGCGATGGTGAGCAAAGGTGAAGA
GGATAATATGGCCATCATCAAAGAATTCATGCGCTTCAAAGTTCATATGGAAGGTAGCGTTAATGGCCACGAATTTG
AAATTGAAGGTGAAGGCGAAGGTCGTCCGTATGAAGGCACCCAGACCGCAAAACTGAAAGTTACCAAAGGTGGTCCG
CTGCCGTTTGCATGGGATATTCTGAGTCCGCAGTTTATGTATGGTAGCAAAGCCTATGTTAAACATCCGGCAGATAT
CCCGGATTATCTGAAACTGAGCTTTCCGGAAGGTTTTAAATGGGAACGTGTGATGAATTTTGAAGATGGTGGTGTTG
TTACCGTTACACAGGATAGCAGCCTGCAGGATGGTGAATTTATCTATAAAGTTAAACTGCGTGGCACGAATTTTCCG
AGTGATGGTCCGGTTATGCAGAAAAAAACCATGGGTTGGGAAGCAAGCAGCGAACGTATGTATCCGGAAGATGGCGC
ACTGAAAGGTGAAATTAAACAGCGTCTGAAGCTGAAAGATGGCGGTCATTATGATGCAGAAGTTAAAACCACCTACA
AAGCCAAAAAACCGGTTCAGCTGCCTGGTGCATATAACGTTAACATTAAACTGGATATCACCAGCCACAACGAGGAT
TATACCATTGTTGAACAGTATGAACGTGCAGAAGGTCGCCATAGTACCGGTGGTATGGATGAACTGTATAAA
(LbCas12a (E795L)-APAPAPAPAPAPAPAPAPAPAPAPA(SEQ ID NO: 21)-
mCherry chimera DNA sequence)
SEQ ID NO: 427
ATGAGCAAACTGGAAAAGTTCACCAACTGTTATAGCCTGAGCAAAACCCTGCGTTTTAAAGCAATTCCGGTTGGTAA
AACCCAAGAGAACATTGATAATAAACGCCTGCTGGTCGAAGATGAAAAACGCGCTGAAGATTATAAAGGCGTGAAAA
AACTGCTGGATCGCTATTATCTGAGCTTCATTAACGATGTGCTGCACAGCATTAAACTGAAGAACCTGAACAACTAT
ATCAGCCTGTTTCGTAAAAAAACCCGCACCGAAAAAGAAAACAAAGAGCTGGAAAACCTGGAAATCAATCTGCGTAA
AGAAATCGCCAAAGCGTTTAAAGGTAACGAGGGTTATAAAAGCCTGTTCAAGAAAGACATCATCGAAACCATTCTGC
CGGAATTTCTGGATGATAAAGATGAAATTGCCCTGGTGAATAGCTTTAATGGCTTTACCACCGCATTTACCGGCTTT
TTTGATAATCGCGAAAACATGTTCAGCGAAGAAGCAAAAAGCACCAGCATTGCATTTCGCTGCATTAATGAAAATCT
GACCCGCTACATTAGCAACATGGATATCTTTGAAAAAGTGGACGCGATCTTCGATAAACACGAAGTGCAAGAGATCA
AAGAGAAAATCCTGAACAGCGATTATGACGTCGAAGATTTTTTTGAAGGCGAGTTCTTTAACTTCGTTCTGACCCAA
GAAGGTATCGACGTTTATAACGCAATTATTGGTGGTTTTGTTACCGAAAGCGGTGAGAAAATCAAAGGCCTGAATGA
ATATATCAACCTGTATAACCAGAAAACCAAACAGAAACTGCCGAAATTCAAACCGCTGTATAAACAGGTTCTGAGCG
ATCGTGAAAGCCTGAGCTTTTATGGTGAAGGTTATACCAGTGATGAAGAGGTTCTGGAAGTTTTTCGTAACACCCTG
AATAAAAACAGCGAGATCTTTAGCAGCATCAAAAAGCTTGAGAAACTGTTCAAAAACTTTGATGAGTATAGCAGCGC
AGGCATCTTTGTTAAAAATGGTCCGGCAATTAGCACCATCAGCAAAGATATTTTTGGCGAATGGAATGTGATCCGCG
ATAAATGGAATGCCGAATATGATGATATCCACCTGAAAAAAAAGGCCGTGGTGACCGAGAAATATGAAGATGATCGT
CGTAAAAGCTTCAAGAAAATTGGTAGCTTTAGCCTGGAACAGCTGCAAGAATATGCAGATGCAGATCTGAGCGTTGT
GGAAAAACTGAAAGAAATCATCATTCAGAAGGTGGACGAGATCTATAAAGTTTATGGTAGCAGCGAAAAACTGTTCG
ATGCAGATTTTGTTCTGGAAAAAAGCCTGAAAAAGAATGATGCCGTTGTGGCCATTATGAAAGATCTGCTGGATAGC
GTTAAGAGCTTCGAGAATTACATCAAAGCCTTTTTTGGTGAGGGCAAAGAAACCAATCGTGATGAAAGTTTCTATGG
CGATTTTGTGCTGGCCTATGATATTCTGCTGAAAGTGGACCATATTTATGATGCCATTCGCAATTATGTTACCCAGA
AACCGTATAGCAAAGACAAGTTCAAACTGTACTTTCAGAACCCGCAGTTTATGGGTGGTTGGGATAAAGATAAAGAA
ACCGATTATCGTGCCACCATCCTGCGTTATGGTAGTAAATACTATCTGGCCATCATGGACAAAAAATACGCAAAATG
CCTGCAGAAAATCGACAAAGATGATGTGAATGGCAACTATGAAAAAATCAACTACAAACTGCTGCCTGGTCCGAATA
AAATGCTGCCGAAAGTGTTCTTTAGCAAGAAATGGATGGCCTATTATAACCCGAGCGAGGATATTCAAAAGATCTAC
AAAAATGGCACCTTTAAAAAGGGCGACATGTTCAATCTGAACGATTGCCACAAACTGATCGATTTCTTCAAAGATTC
AATTTCGCGTTATCCGAAATGGTCCAATGCCTATGATTTTAACTTTAGCGAAACCGAAAAATACAAAGACATTGCCG
GTTTTTATCGCGAAGTGGAAGAACAGGGCTATAAAGTGAGCTTTGAAAGCGCAAGCAAAAAAGAGGTTGATAAGCTG
GTTGAAGAGGGCAAACTGTATATGTTCCAGATTTACAACAAAGATTTTAGCGACAAAAGCCATGGCACCCCGAATCT
GCATACCATGTACTTTAAACTGCTGTTCGACGAAAATAACCATGGTCAGATTCGTCTGAGCGGTGGTGCCGAACTGT
TTATGCGTCGTGCAAGTCTGAAAAAAGAAGAACTGGTTGTTCATCCGGCAAATAGCCCGATTGCAAACAAAAATCCG
GACAATCCGAAAAAAACCACGACACTGAGCTATGATGTGTATAAAGACAAACGTTTTAGCGAGGATCAGTATCTGCT
GCATATCCCGATTGCCATCAATAAATGCCCGAAAAACATCTTTAAGATCAACACCGAAGTTCGCGTGCTGCTGAAAC
ATGATGATAATCCGTATGTGATTGGCATTGATCGTGGTGAACGTAACCTGCTGTATATTGTTGTTGTTGATGGTAAA
GGCAACATCGTGGAACAGTATAGTCTGAACGAAATTATCAACAACTTTAACGGCATCCGCATCAAAACCGACTATCA
TAGCCTGCTGGACAAGAAAGAAAAAGAACGTTTTGAAGCACGTCAGAACTGGACCAGTATTGAAAACATCAAAGAAC
TGAAAGCCGGTTATATTAGCCAGGTGGTTCATAAAATCTGTGAGCTGGTAGAAAAATACGATGCAGTTATTGCACTG
GAAGATCTGAATAGCGGTTTCAAAAATAGCCGTGTGAAAGTCGAAAAACAGGTGTATCAGAAATTCGAGAAAATGCT
GATCGACAAACTGAACTACATGGTCGACAAAAAAAGCAATCCGTGTGCAACCGGTGGTGCACTGAAAGGTTATCAGA
TTACCAACAAATTTGAAAGCTTTAAAAGCATGAGCACCCAGAACGGCTTTATCTTCTATATTCCGGCATGGCTGACC
AGCAAAATTGATCCGAGCACCGGTTTTGTGAACCTGCTGAAAACAAAATATACCTCCATTGCCGACAGCAAGAAGTT
TATTAGCAGCTTTGATCGCATTATGTATGTTCCGGAAGAGGACCTGTTTGAATTCGCACTGGATTACAAAAATTTCA
GCCGTACCGATGCCGACTACATCAAAAAATGGAAACTGTACAGCTATGGTAACCGCATTCGCATTTTTCGCAACCCG
AAGAAAAACAATGTGTTCGATTGGGAAGAAGTTTGTCTGACCAGCGCATATAAAGAACTTTTCAACAAATACGGCAT
CAACTATCAGCAGGGTGATATTCGTGCACTGCTGTGTGAACAGAGCGATAAAGCGTTTTATAGCAGTTTTATGGCAC
TGATGAGCCTGATGCTGCAGATGCGTAATAGCATTACCGGTCGCACCGATGTGGATTTTCTGATTAGTCCGGTGAAA
AATTCCGATGGCATCTTTTATGATAGCCGCAATTACGAAGCACAAGAAAATGCAATTCTGCCGAAAAACGCAGATGC
AAATGGTGCATATAACATTGCACGTAAAGTTCTGTGGGCAATTGGCCAGTTTAAGAAAGCAGAAGATGAGAAGCTGG
ACAAAGTGAAAATTGCGATCAGCAATAAAGAGTGGCTGGAATACGCACAGACCAGCGTTAAACATGCGCCAGCGCCT
GCTCCTGCACCCGCTCCAGCTCCTGCCCCAGCTCCAGCGCCCGCTCCTGCTCCTGCACCTGCGATGGTGAGCAAAGG
TGAAGAGGATAATATGGCCATCATCAAAGAATTCATGCGCTTCAAAGTTCATATGGAAGGTAGCGTTAATGGCCACG
AATTTGAAATTGAAGGTGAAGGCGAAGGTCGTCCGTATGAAGGCACCCAGACCGCAAAACTGAAAGTTACCAAAGGT
GGTCCGCTGCCGTTTGCATGGGATATTCTGAGTCCGCAGTTTATGTATGGTAGCAAAGCCTATGTTAAACATCCGGC
AGATATCCCGGATTATCTGAAACTGAGCTTTCCGGAAGGTTTTAAATGGGAACGTGTGATGAATTTTGAAGATGGTG
GTGTTGTTACCGTTACACAGGATAGCAGCCTGCAGGATGGTGAATTTATCTATAAAGTTAAACTGCGTGGCACGAAT
TTTCCGAGTGATGGTCCGGTTATGCAGAAAAAAACCATGGGTTGGGAAGCAAGCAGCGAACGTATGTATCCGGAAGA
TGGCGCACTGAAAGGTGAAATTAAACAGCGTCTGAAGCTGAAAGATGGCGGTCATTATGATGCAGAAGTTAAAACCA
CCTACAAAGCCAAAAAACCGGTTCAGCTGCCTGGTGCATATAACGTTAACATTAAACTGGATATCACCAGCCACAAC
GAGGATTATACCATTGTTGAACAGTATGAACGTGCAGAAGGTCGCCATAGTACCGGTGGTATGGATGAACTGTATAA
A
(LbCas12a (E795L)-APAPAPAPAPAPAPAPAPAPAPAPAPA(SEQ ID NO: 22)-
mCherry chimera DNA sequence)
SEQ ID NO: 428
ATGAGCAAACTGGAAAAGTTCACCAACTGTTATAGCCTGAGCAAAACCCTGCGTTTTAAAGCAATTCCGGTTGGTAA
AACCCAAGAGAACATTGATAATAAACGCCTGCTGGTCGAAGATGAAAAACGCGCTGAAGATTATAAAGGCGTGAAAA
AACTGCTGGATCGCTATTATCTGAGCTTCATTAACGATGTGCTGCACAGCATTAAACTGAAGAACCTGAACAACTAT
ATCAGCCTGTTTCGTAAAAAAACCCGCACCGAAAAAGAAAACAAAGAGCTGGAAAACCTGGAAATCAATCTGCGTAA
AGAAATCGCCAAAGCGTTTAAAGGTAACGAGGGTTATAAAAGCCTGTTCAAGAAAGACATCATCGAAACCATTCTGC
CGGAATTTCTGGATGATAAAGATGAAATTGCCCTGGTGAATAGCTTTAATGGCTTTACCACCGCATTTACCGGCTTT
TTTGATAATCGCGAAAACATGTTCAGCGAAGAAGCAAAAAGCACCAGCATTGCATTTCGCTGCATTAATGAAAATCT
GACCCGCTACATTAGCAACATGGATATCTTTGAAAAAGTGGACGCGATCTTCGATAAACACGAAGTGCAAGAGATCA
AAGAGAAAATCCTGAACAGCGATTATGACGTCGAAGATTTTTTTGAAGGCGAGTTCTTTAACTTCGTTCTGACCCAA
GAAGGTATCGACGTTTATAACGCAATTATTGGTGGTTTTGTTACCGAAAGCGGTGAGAAAATCAAAGGCCTGAATGA
ATATATCAACCTGTATAACCAGAAAACCAAACAGAAACTGCCGAAATTCAAACCGCTGTATAAACAGGTTCTGAGCG
ATCGTGAAAGCCTGAGCTTTTATGGTGAAGGTTATACCAGTGATGAAGAGGTTCTGGAAGTTTTTCGTAACACCCTG
AATAAAAACAGCGAGATCTTTAGCAGCATCAAAAAGCTTGAGAAACTGTTCAAAAACTTTGATGAGTATAGCAGCGC
AGGCATCTTTGTTAAAAATGGTCCGGCAATTAGCACCATCAGCAAAGATATTTTTGGCGAATGGAATGTGATCCGCG
ATAAATGGAATGCCGAATATGATGATATCCACCTGAAAAAAAAGGCCGTGGTGACCGAGAAATATGAAGATGATCGT
CGTAAAAGCTTCAAGAAAATTGGTAGCTTTAGCCTGGAACAGCTGCAAGAATATGCAGATGCAGATCTGAGCGTTGT
GGAAAAACTGAAAGAAATCATCATTCAGAAGGTGGACGAGATCTATAAAGTTTATGGTAGCAGCGAAAAACTGTTCG
ATGCAGATTTTGTTCTGGAAAAAAGCCTGAAAAAGAATGATGCCGTTGTGGCCATTATGAAAGATCTGCTGGATAGC
GTTAAGAGCTTCGAGAATTACATCAAAGCCTTTTTTGGTGAGGGCAAAGAAACCAATCGTGATGAAAGTTTCTATGG
CGATTTTGTGCTGGCCTATGATATTCTGCTGAAAGTGGACCATATTTATGATGCCATTCGCAATTATGTTACCCAGA
AACCGTATAGCAAAGACAAGTTCAAACTGTACTTTCAGAACCCGCAGTTTATGGGTGGTTGGGATAAAGATAAAGAA
ACCGATTATCGTGCCACCATCCTGCGTTATGGTAGTAAATACTATCTGGCCATCATGGACAAAAAATACGCAAAATG
CCTGCAGAAAATCGACAAAGATGATGTGAATGGCAACTATGAAAAAATCAACTACAAACTGCTGCCTGGTCCGAATA
AAATGCTGCCGAAAGTGTTCTTTAGCAAGAAATGGATGGCCTATTATAACCCGAGCGAGGATATTCAAAAGATCTAC
AAAAATGGCACCTTTAAAAAGGGCGACATGTTCAATCTGAACGATTGCCACAAACTGATCGATTTCTTCAAAGATTC
AATTTCGCGTTATCCGAAATGGTCCAATGCCTATGATTTTAACTTTAGCGAAACCGAAAAATACAAAGACATTGCCG
GTTTTTATCGCGAAGTGGAAGAACAGGGCTATAAAGTGAGCTTTGAAAGCGCAAGCAAAAAAGAGGTTGATAAGCTG
GTTGAAGAGGGCAAACTGTATATGTTCCAGATTTACAACAAAGATTTTAGCGACAAAAGCCATGGCACCCCGAATCT
GCATACCATGTACTTTAAACTGCTGTTCGACGAAAATAACCATGGTCAGATTCGTCTGAGCGGTGGTGCCGAACTGT
TTATGCGTCGTGCAAGTCTGAAAAAAGAAGAACTGGTTGTTCATCCGGCAAATAGCCCGATTGCAAACAAAAATCCG
GACAATCCGAAAAAAACCACGACACTGAGCTATGATGTGTATAAAGACAAACGTTTTAGCGAGGATCAGTATCTGCT
GCATATCCCGATTGCCATCAATAAATGCCCGAAAAACATCTTTAAGATCAACACCGAAGTTCGCGTGCTGCTGAAAC
ATGATGATAATCCGTATGTGATTGGCATTGATCGTGGTGAACGTAACCTGCTGTATATTGTTGTTGTTGATGGTAAA
GGCAACATCGTGGAACAGTATAGTCTGAACGAAATTATCAACAACTTTAACGGCATCCGCATCAAAACCGACTATCA
TAGCCTGCTGGACAAGAAAGAAAAAGAACGTTTTGAAGCACGTCAGAACTGGACCAGTATTGAAAACATCAAAGAAC
TGAAAGCCGGTTATATTAGCCAGGTGGTTCATAAAATCTGTGAGCTGGTAGAAAAATACGATGCAGTTATTGCACTG
GAAGATCTGAATAGCGGTTTCAAAAATAGCCGTGTGAAAGTCGAAAAACAGGTGTATCAGAAATTCGAGAAAATGCT
GATCGACAAACTGAACTACATGGTCGACAAAAAAAGCAATCCGTGTGCAACCGGTGGTGCACTGAAAGGTTATCAGA
TTACCAACAAATTTGAAAGCTTTAAAAGCATGAGCACCCAGAACGGCTTTATCTTCTATATTCCGGCATGGCTGACC
AGCAAAATTGATCCGAGCACCGGTTTTGTGAACCTGCTGAAAACAAAATATACCTCCATTGCCGACAGCAAGAAGTT
TATTAGCAGCTTTGATCGCATTATGTATGTTCCGGAAGAGGACCTGTTTGAATTCGCACTGGATTACAAAAATTTCA
GCCGTACCGATGCCGACTACATCAAAAAATGGAAACTGTACAGCTATGGTAACCGCATTCGCATTTTTCGCAACCCG
AAGAAAAACAATGTGTTCGATTGGGAAGAAGTTTGTCTGACCAGCGCATATAAAGAACTTTTCAACAAATACGGCAT
CAACTATCAGCAGGGTGATATTCGTGCACTGCTGTGTGAACAGAGCGATAAAGCGTTTTATAGCAGTTTTATGGCAC
TGATGAGCCTGATGCTGCAGATGCGTAATAGCATTACCGGTCGCACCGATGTGGATTTTCTGATTAGTCCGGTGAAA
AATTCCGATGGCATCTTTTATGATAGCCGCAATTACGAAGCACAAGAAAATGCAATTCTGCCGAAAAACGCAGATGC
AAATGGTGCATATAACATTGCACGTAAAGTTCTGTGGGCAATTGGCCAGTTTAAGAAAGCAGAAGATGAGAAGCTGG
ACAAAGTGAAAATTGCGATCAGCAATAAAGAGTGGCTGGAATACGCACAGACCAGCGTTAAACATGCGCCAGCGCCT
GCTCCTGCACCCGCTCCAGCTCCTGCCCCAGCTCCAGCGCCCGCTCCTGCGCCAGCTCCTGCACCTGCGATGGTGAG
CAAAGGTGAAGAGGATAATATGGCCATCATCAAAGAATTCATGCGCTTCAAAGTTCATATGGAAGGTAGCGTTAATG
GCCACGAATTTGAAATTGAAGGTGAAGGCGAAGGTCGTCCGTATGAAGGCACCCAGACCGCAAAACTGAAAGTTACC
AAAGGTGGTCCGCTGCCGTTTGCATGGGATATTCTGAGTCCGCAGTTTATGTATGGTAGCAAAGCCTATGTTAAACA
TCCGGCAGATATCCCGGATTATCTGAAACTGAGCTTTCCGGAAGGTTTTAAATGGGAACGTGTGATGAATTTTGAAG
ATGGTGGTGTTGTTACCGTTACACAGGATAGCAGCCTGCAGGATGGTGAATTTATCTATAAAGTTAAACTGCGTGGC
ACGAATTTTCCGAGTGATGGTCCGGTTATGCAGAAAAAAACCATGGGTTGGGAAGCAAGCAGCGAACGTATGTATCC
GGAAGATGGCGCACTGAAAGGTGAAATTAAACAGCGTCTGAAGCTGAAAGATGGCGGTCATTATGATGCAGAAGTTA
AAACCACCTACAAAGCCAAAAAACCGGTTCAGCTGCCTGGTGCATATAACGTTAACATTAAACTGGATATCACCAGC
CACAACGAGGATTATACCATTGTTGAACAGTATGAACGTGCAGAAGGTCGCCATAGTACCGGTGGTATGGATGAACT
GTATAAA
(LbCas12a (E795L)-APAPAPAPAPAPAPAPAPAPAPAPAPAPA(SEQ ID NO: 23)-
mCherry chimera DNA sequence)
SEQ ID NO: 429
ATGAGCAAACTGGAAAAGTTCACCAACTGTTATAGCCTGAGCAAAACCCTGCGTTTTAAAGCAATTCCGGTTGGTAA
AACCCAAGAGAACATTGATAATAAACGCCTGCTGGTCGAAGATGAAAAACGCGCTGAAGATTATAAAGGCGTGAAAA
AACTGCTGGATCGCTATTATCTGAGCTTCATTAACGATGTGCTGCACAGCATTAAACTGAAGAACCTGAACAACTAT
ATCAGCCTGTTTCGTAAAAAAACCCGCACCGAAAAAGAAAACAAAGAGCTGGAAAACCTGGAAATCAATCTGCGTAA
AGAAATCGCCAAAGCGTTTAAAGGTAACGAGGGTTATAAAAGCCTGTTCAAGAAAGACATCATCGAAACCATTCTGC
CGGAATTTCTGGATGATAAAGATGAAATTGCCCTGGTGAATAGCTTTAATGGCTTTACCACCGCATTTACCGGCTTT
TTTGATAATCGCGAAAACATGTTCAGCGAAGAAGCAAAAAGCACCAGCATTGCATTTCGCTGCATTAATGAAAATCT
GACCCGCTACATTAGCAACATGGATATCTTTGAAAAAGTGGACGCGATCTTCGATAAACACGAAGTGCAAGAGATCA
AAGAGAAAATCCTGAACAGCGATTATGACGTCGAAGATTTTTTTGAAGGCGAGTTCTTTAACTTCGTTCTGACCCAA
GAAGGTATCGACGTTTATAACGCAATTATTGGTGGTTTTGTTACCGAAAGCGGTGAGAAAATCAAAGGCCTGAATGA
ATATATCAACCTGTATAACCAGAAAACCAAACAGAAACTGCCGAAATTCAAACCGCTGTATAAACAGGTTCTGAGCG
ATCGTGAAAGCCTGAGCTTTTATGGTGAAGGTTATACCAGTGATGAAGAGGTTCTGGAAGTTTTTCGTAACACCCTG
AATAAAAACAGCGAGATCTTTAGCAGCATCAAAAAGCTTGAGAAACTGTTCAAAAACTTTGATGAGTATAGCAGCGC
AGGCATCTTTGTTAAAAATGGTCCGGCAATTAGCACCATCAGCAAAGATATTTTTGGCGAATGGAATGTGATCCGCG
ATAAATGGAATGCCGAATATGATGATATCCACCTGAAAAAAAAGGCCGTGGTGACCGAGAAATATGAAGATGATCGT
CGTAAAAGCTTCAAGAAAATTGGTAGCTTTAGCCTGGAACAGCTGCAAGAATATGCAGATGCAGATCTGAGCGTTGT
GGAAAAACTGAAAGAAATCATCATTCAGAAGGTGGACGAGATCTATAAAGTTTATGGTAGCAGCGAAAAACTGTTCG
ATGCAGATTTTGTTCTGGAAAAAAGCCTGAAAAAGAATGATGCCGTTGTGGCCATTATGAAAGATCTGCTGGATAGC
GTTAAGAGCTTCGAGAATTACATCAAAGCCTTTTTTGGTGAGGGCAAAGAAACCAATCGTGATGAAAGTTTCTATGG
CGATTTTGTGCTGGCCTATGATATTCTGCTGAAAGTGGACCATATTTATGATGCCATTCGCAATTATGTTACCCAGA
AACCGTATAGCAAAGACAAGTTCAAACTGTACTTTCAGAACCCGCAGTTTATGGGTGGTTGGGATAAAGATAAAGAA
ACCGATTATCGTGCCACCATCCTGCGTTATGGTAGTAAATACTATCTGGCCATCATGGACAAAAAATACGCAAAATG
CCTGCAGAAAATCGACAAAGATGATGTGAATGGCAACTATGAAAAAATCAACTACAAACTGCTGCCTGGTCCGAATA
AAATGCTGCCGAAAGTGTTCTTTAGCAAGAAATGGATGGCCTATTATAACCCGAGCGAGGATATTCAAAAGATCTAC
AAAAATGGCACCTTTAAAAAGGGCGACATGTTCAATCTGAACGATTGCCACAAACTGATCGATTTCTTCAAAGATTC
AATTTCGCGTTATCCGAAATGGTCCAATGCCTATGATTTTAACTTTAGCGAAACCGAAAAATACAAAGACATTGCCG
GTTTTTATCGCGAAGTGGAAGAACAGGGCTATAAAGTGAGCTTTGAAAGCGCAAGCAAAAAAGAGGTTGATAAGCTG
GTTGAAGAGGGCAAACTGTATATGTTCCAGATTTACAACAAAGATTTTAGCGACAAAAGCCATGGCACCCCGAATCT
GCATACCATGTACTTTAAACTGCTGTTCGACGAAAATAACCATGGTCAGATTCGTCTGAGCGGTGGTGCCGAACTGT
TTATGCGTCGTGCAAGTCTGAAAAAAGAAGAACTGGTTGTTCATCCGGCAAATAGCCCGATTGCAAACAAAAATCCG
GACAATCCGAAAAAAACCACGACACTGAGCTATGATGTGTATAAAGACAAACGTTTTAGCGAGGATCAGTATCTGCT
GCATATCCCGATTGCCATCAATAAATGCCCGAAAAACATCTTTAAGATCAACACCGAAGTTCGCGTGCTGCTGAAAC
ATGATGATAATCCGTATGTGATTGGCATTGATCGTGGTGAACGTAACCTGCTGTATATTGTTGTTGTTGATGGTAAA
GGCAACATCGTGGAACAGTATAGTCTGAACGAAATTATCAACAACTTTAACGGCATCCGCATCAAAACCGACTATCA
TAGCCTGCTGGACAAGAAAGAAAAAGAACGTTTTGAAGCACGTCAGAACTGGACCAGTATTGAAAACATCAAAGAAC
TGAAAGCCGGTTATATTAGCCAGGTGGTTCATAAAATCTGTGAGCTGGTAGAAAAATACGATGCAGTTATTGCACTG
GAAGATCTGAATAGCGGTTTCAAAAATAGCCGTGTGAAAGTCGAAAAACAGGTGTATCAGAAATTCGAGAAAATGCT
GATCGACAAACTGAACTACATGGTCGACAAAAAAAGCAATCCGTGTGCAACCGGTGGTGCACTGAAAGGTTATCAGA
TTACCAACAAATTTGAAAGCTTTAAAAGCATGAGCACCCAGAACGGCTTTATCTTCTATATTCCGGCATGGCTGACC
AGCAAAATTGATCCGAGCACCGGTTTTGTGAACCTGCTGAAAACAAAATATACCTCCATTGCCGACAGCAAGAAGTT
TATTAGCAGCTTTGATCGCATTATGTATGTTCCGGAAGAGGACCTGTTTGAATTCGCACTGGATTACAAAAATTTCA
GCCGTACCGATGCCGACTACATCAAAAAATGGAAACTGTACAGCTATGGTAACCGCATTCGCATTTTTCGCAACCCG
AAGAAAAACAATGTGTTCGATTGGGAAGAAGTTTGTCTGACCAGCGCATATAAAGAACTTTTCAACAAATACGGCAT
CAACTATCAGCAGGGTGATATTCGTGCACTGCTGTGTGAACAGAGCGATAAAGCGTTTTATAGCAGTTTTATGGCAC
TGATGAGCCTGATGCTGCAGATGCGTAATAGCATTACCGGTCGCACCGATGTGGATTTTCTGATTAGTCCGGTGAAA
AATTCCGATGGCATCTTTTATGATAGCCGCAATTACGAAGCACAAGAAAATGCAATTCTGCCGAAAAACGCAGATGC
AAATGGTGCATATAACATTGCACGTAAAGTTCTGTGGGCAATTGGCCAGTTTAAGAAAGCAGAAGATGAGAAGCTGG
ACAAAGTGAAAATTGCGATCAGCAATAAAGAGTGGCTGGAATACGCACAGACCAGCGTTAAACATGCGCCAGCGCCT
GCTCCTGCACCCGCTCCAGCTCCTGCCCCAGCTCCAGCGCCCGCTCCTGCGCCAGCTCCTGCACCTGCTCCAGCGAT
GGTGAGCAAAGGTGAAGAGGATAATATGGCCATCATCAAAGAATTCATGCGCTTCAAAGTTCATATGGAAGGTAGCG
TTAATGGCCACGAATTTGAAATTGAAGGTGAAGGCGAAGGTCGTCCGTATGAAGGCACCCAGACCGCAAAACTGAAA
GTTACCAAAGGTGGTCCGCTGCCGTTTGCATGGGATATTCTGAGTCCGCAGTTTATGTATGGTAGCAAAGCCTATGT
TAAACATCCGGCAGATATCCCGGATTATCTGAAACTGAGCTTTCCGGAAGGTTTTAAATGGGAACGTGTGATGAATT
TTGAAGATGGTGGTGTTGTTACCGTTACACAGGATAGCAGCCTGCAGGATGGTGAATTTATCTATAAAGTTAAACTG
CGTGGCACGAATTTTCCGAGTGATGGTCCGGTTATGCAGAAAAAAACCATGGGTTGGGAAGCAAGCAGCGAACGTAT
GTATCCGGAAGATGGCGCACTGAAAGGTGAAATTAAACAGCGTCTGAAGCTGAAAGATGGCGGTCATTATGATGCAG
AAGTTAAAACCACCTACAAAGCCAAAAAACCGGTTCAGCTGCCTGGTGCATATAACGTTAACATTAAACTGGATATC
ACCAGCCACAACGAGGATTATACCATTGTTGAACAGTATGAACGTGCAGAAGGTCGCCATAGTACCGGTGGTATGGA
TGAACTGTATAAA

[0105] All references, including publications, patent applications, and patents cited herein are hereby incorporated by reference to the same extent as if each reference were individually and specifically indicated to be incorporated by reference and were set forth in its entirety herein.

### REFERENCES

[0106] 1. Jinek, M., et al., A programmable dual-RNA-guided DNA endonuclease in adaptive bacterial immunity. Science, 2012. 337(6096): p. 816-21.
[0107] 2. Rees, H. A. and D. R. Liu, Base editing: precision chemistry on the genome and transcriptome of living cells. Nat Rev Genet, 2018. 19(12): p. 770-788.
[0108] 3. Komor, A. C., et al., Programmable editing of a target base in genomic DNA without double-stranded DNA cleavage. Nature, 2016. 533(7603): p. 420-4.
[0109] 4. Gaudelli, N. M., et al., Programmable base editing of A*T to G*C in genomic DNA without DNA cleavage. Nature, 2017. 551(7681): p. 464-471.
[0110] 5. Nishida, K., et al., Targeted nucleotide editing using hybrid prokaryotic and vertebrate adaptive immune systems. Science, 2016. 353(6305).
[0111] 6. Qi, L. S., et al., Repurposing CRISPR as an RNA-guided platform for sequence specific control of gene expression. Cell, 2013. 152(5): p. 1173-83.
[0112] 7. Gilbert, L. A., et al., CRISPR-mediated modular RNA-guided regulation of transcription in eukaryotes. Cell, 2013. 154(2): p. 442-51.
[0113] 8. Gilbert, L. A., et al., Genome-Scale CRISPR-Mediated Control of Gene Repression and Activation. Cell, 2014. 159(3): p. 647-61.
[0114] 9. Anzalone, A. V., et al., Search-and-replace genome editing without double-strand breaks or donor DNA. Nature, 2019. 576(7785): p. 149-157.
[0115] 10. Cong, L., et al., Multiplex genome engineering using CRISPR/Cas systems. Science, 2013. 339(6121): p. 819-23.
[0116] 11. Vakulskas, C. A., et al., A high-fidelity Cas9 mutant delivered as a ribonucleoprotein complex enables efficient gene editing in human hematopoietic stem and progenitor cells. Nat Med, 2018. 24(8): p. 1216-1224.
[0117] 12. Slaymaker, I. M., et al., Rationally engineered Cas9 nucleases with improved specificity. Science, 2016. 351(6268): p. 84-8.
[0118] 13. Kleinstiver, B. P., et al., High-fidelity CRISPR-Cas9 nucleases with no detectable genome-wide off-target effects. Nature, 2016. 529(7587): p. 490-5.
[0119] 14. Chen, J. S., et al., Enhanced proofreading governs CRISPR-Cas9 targeting accuracy. Nature, 2017. 550(7676): p. 407-410.
[0120] 15. McCormick, A. L., M. S. Thomas, and A. W. Heath, Immunization with an interferongamma-gp120fusion protein induces enhanced immune responses to human immunodeficiency virus gp120. J Infect Dis, 2001. 184(11): p. 1423-30.
[0121] 16. Bai, Y. and W. C. Shen, Improving the oral efficacy of recombinant granulocyte colony-stimulating factor and transferrin fusion protein by spacer optimization. Pharm Res, 2006. 23(9): p. 2116-21.
[0122] 17. Wriggers, W., S. Chakravarty, and P. A. Jennings, Control of protein functional dynamics by peptide linkers. Biopolymers, 2005. 80(6): p. 736-46.
[0123] 18. Arai, R., et al., Design of the linkers which effectively separate domains of a bifunctional fusion protein. Protein Eng, 2001. 14(8): p. 529-32.
[0124] 19. Marqusee, S. and R. L. Baldwin, Helix stabilization by Glu- . . . Lys+ salt bridges in short peptides of de novo design. Proc Natl Acad Sci USA, 1987. 84(24): p. 8898-902.
[0125] 20. Bhandari, D. G., et al., 1H-NM Rstudy of mobility and conformational constraints within the proline-rich N-terminal of the LC1 alkali light chain of skeletal myosin. Correlation with similar segments in other protein systems. Eur J Biochem, 1986. 160(2): p. 349-56.
[0126] 21. Chen, X., J. L. Zaro, and W. C. Shen, Fusion protein linkers: property, design and functionality. Adv Drug Deliv Rev, 2013. 65(10): p. 1357-69.
[0127] 22. Brendan P. Cormack, Raphael H. Valdivia, Stanley Falkow, FACS-optimized mutants of the green fluorescent protein (GFP), Gene, 1996. 173 (1): 33-38.
[0128] 23. Shaner N C, Campbell R E, Steinbach P A, Giepmans B N, Palmer A E, Tsien R Y. Improved monomeric red, orange and yellow fluorescent proteins derived from Discosoma sp. red fluorescent protein. Nat Biotechnol. 2004 December; 22(12):1567-72.
[0129] 24. Peng, R., Li, Z., Xu, Y., He, S., Peng, Q., Wu, L. A., Wu, Y., Qi, J., Wang, P., Shi, Y. and Gao, G. F. Structural insight into multistage inhibition of CRISPR-Cas12a by AcrVA4, Proc. Natl. Acad. Sci. U.S.A. 2019 116(38):18928-18936.

1-24. (canceled)

25. A chimeric protein comprising a guided endonuclease protein, a universal linker, and a second protein.

26. The chimeric protein of claim 25, wherein the guided endonuclease protein is a Cas protein.

27. The chimeric protein of claim 26, wherein the Cas protein is selected from the group consisting of Cas9 protein, AsCas12a protein, LbCas12a protein, a variant of Cas9 protein, a variant of AsCas12a protein, and a variant of LbCas12a protein.

28. The chimeric protein of claim 26, wherein the Cas protein is selected from the group comprising SEQ ID NO: 1, 2, and 3.

29. The chimeric protein of claim 26, wherein the Cas protein is SEQ ID NO: 1.

30. The chimeric protein of claim 26, wherein the Cas protein is SEQ ID NO: 2.

31. The chimeric protein of claim 26, wherein the Cas protein is SEQ ID NO: 3.

32. The chimeric protein of claim 25, wherein the second protein is a fluorescent protein.

33. The chimeric protein of claim 32, wherein the fluorescent protein is selected from the group comprising SEQ ID NO: 4 and 5.

34. The chimeric protein of claim 32, wherein the fluorescent protein is SEQ ID NO: 4.

35. The chimeric protein of claim 32, wherein the fluorescent protein is SEQ ID NO: 5.

36. The chimeric protein of claim 25, wherein the universal linker is selected from a flexible linker, a rigid linker, and a mixed linker.

37. The chimeric protein of claim 36, wherein the universal linker comprises a flexible linker selected from the group consisting of SEQ ID NO: 6 and 7.

38. The chimeric protein of claim 36, wherein the universal linker comprises a rigid linker selected from the group consisting of XP, APA, and SEQ ID NO: 8-36.

39. The chimeric protein of claim 36, wherein the universal linker comprises a mixed linker of SEQ ID NO: 37.

40. The chimeric protein of claim 25, wherein the chimeric protein is selected from the group consisting of SEQ ID NO: 38-309.

41. An isolated nucleic acid, wherein the isolated nucleic acid encodes the chimeric protein according to claim 40.

42. The isolated nucleic acid of claim 41, wherein the isolated nucleic acid is codon optimized for expression in an organism or host cell.

43. The isolated nucleic acid of claim 42, wherein the organism or host cell is selected from E. coli or H. sapiens.

44. The isolated nucleic acid of claim 41, wherein the isolated nucleic acid is selected from the group consisting of SEQ ID NO: 348-387 and 389-429.

45-47. (canceled)

The application's sequence listing, which the Patent Office published only in electronic form, follows.

SEQUENCE LISTING (441 sequences)

SEQ ID NO: 1 - protein, 1368 aa, synthetic construct [sequence omitted]

SEQ ID NO: 2 - protein, 1307 aa, synthetic construct
  REGION 1..1307: note = SYNTHETIC SEQUENCE
MTQFEGFTNLYQVSKTLRFELIPQGKTLKHIQEQGFIEEDKARNDHYKELKPIIDRIYKTYADQCLQLVQLDWENLSAAIDSYRKEKTEETRNALIEEQATYRNAIHDYFIGRTDNLTDAINKRHAEIYKGLFKAELFNGKVLKQLGTVTTTEHENALLRSFDKFTTYFSGFYENRKNVFSAEDISTAIPHRIVQDNFPKFKENCHIFTRLITAVPSLREHFENVKKAIGIFVSTSIEEVFSFPFYNQLLTQTQIDLYNQLLGGISREAGTEKIKGLNEVLNLAIQKNDETAHIIASLPHRFIPLFKQILSDRNTLSFILEEFKSDEEVIQSFCKYKTLLRNENVLETAEALFNELNSIDLTHIFISHKKLETISSALCDHWDTLRNALYERRISELTGKITKSAKEKVQRSLKHEDINLQEIISAAGKELSEAFKQKTSEILSHAHAALDQPLPTTLKKQEEKEILKSQLDSLLGLYHLLDWFAVDESNEVDPEFSARLTGIKLEMEPSLSFYNKARNYATKKPYSVEKFKLNFQMPTLASGWDVNKEKNNGAILFVKNGLYYLGIMPKQKGRYKALSFEPTEKTSEGFDKMYYDYFPDAAKMIPKCSTQLKAVTAHFQTHTTPILLSNNFIEPLEITKEIYDLNNPEKEPKKFQTAYAKKTGDQKGYREALCKWIDFTRDFLSKYTKTTSIDLSSLRPSSQYKDLGEYYAELNPLLYHISFQRIAEKEIMDAVETGKLYLFQIYNKDFAKGHHGKPNLHTLYWTGLFSPENLAKTSIKLNGQAELFYRPKSRMKRMAHRLGEKMLNKKLKDQKTPIPDTLYQELYDYVNHRLSHDLSDEARALLPNVITKEVSHEIIKDRRFTSDKFFFHVPITLNYQAANSPSKFNQRVNAYLKEHPETPIIGIDRGERNLIYITVIDSTGKILEQRSLNTIQQFDYQKKLDNREKERVAARQAWSVVGTIKDLKQGYLSQVIHEIVDLMIHYQAVVVLENLNFGFKSKRTGIAEKAVYQQFEKMLIDKLNCLVLKDYPAEKVGGVLNPYQLTDQFTSFAKMGTQSGFLFYVPAPYTSKIDPLTGFVDPFVWKTIKNHESRKHFLEGFDFLHYDVKTGDFILHFKMNRNLSFQRGLPGFMPAWDIVFEKNETQFDAKGTPFIAGKRIVPVIENHRFTGRYRDLYPANELIALLEEKGIVFRDGSNILPKLLENDDSHAIDTMVALIRSVLQMRNSNAATGEDYINSPVRDLNGVCFDSRFQNPEWPMDADANGAYHIALKGQLLLNHLKESKDLKLQNGISNQDWLAYIQELRN

SEQ ID NO: 3 - protein, 1228 aa, synthetic construct
  REGION 1..1228: note = SYNTHETIC SEQUENCE
MSKLEKFTNCYSLSKTLRFKAIPVGKTQENIDNKRLLVEDEKRAEDYKGVKKLLDRYYLSFINDVLHSIKLKNLNNYISLFRKKTRTEKENKELENLEINLRKEIAKAFKGNEGYKSLFKKDIIETILPEFLDDKDEIALVNSFNGFTTAFTGFFDNRENMFSEEAKSTSIAFRCINENLTRYISNMDIFEKVDAIFDKHEVQEIKEKILNSDYDVEDFFEGEFFNFVLTQEGIDVYNAIIGGFVTESGEKIKGLNEYINLYNQKTKQKLPKFKPLYKQVLSDRESLSFYGEGYTSDEEVLEVFRNTLNKNSEIFSSIKKLEKLFKNFDEYSSAGIFVKNGPAISTISKDIFGEWNVIRDKWNAEYDDIHLKKKAVVTEKYEDDRRKSFKKIGSFSLEQLQEYADADLSVVEKLKEIIIQKVDEIYKVYGSSEKLFDADFVLEKSLKKNDAVVAIMKDLLDSVKSFENYIKAFFGEGKETNRDESFYGDFVLAYDILLKVDHIYDAIRNYVTQKPYSKDKFKLYFQNPQFMGGWDKDKETDYRATILRYGSKYYLAIMDKKYAKCLQKIDKDDVNGNYEKINYKLLPGPNKMLPKVFFSKKWMAYYNPSEDIQKIYKNGTFKKGDMFNLNDCHKLIDFFKDSISRYPKWSNAYDFNFSETEKYKDIAGFYREVEEQGYKVSFESASKKEVDKLVEEGKLYMFQIYNKDFSDKSHGTPNLHTMYFKLLFDENNHGQIRLSGGAELFMRRASLKKEELVVHPANSPIANKNPDNPKKTTTLSYDVYKDKRFSEDQYELHIPIAINKCPKNIFKINTEVRVLLKHDDNPYVIGIDRGERNLLYIVVVDGKGNIVEQYSLNEIINNFNGIRIKTDYHSLLDKKEKERFEARQNWTSIENIKELKAGYISQVVHKICELVEKYDAVIALEDLNSGFKNSRVKVEKQVYQKFEKMLIDKLNYMVDKKSNPCATGGALKGYQITNKFESFKSMSTQNGFIFYIPAWLTSKIDPSTGFVNLLKTKYTSIADSKKFISSFDRIMYVPEEDLFEFALDYKNFSRTDADYIKKWKLYSYGNRIRIFRNPKKNNVFDWEEVCLTSAYKELFNKYGINYQQGDIRALLCEQSDKAFYSSFMALMSLMLQMRNSITGRTDVDFLISPVKNSDGIFYDSRNYEAQENAILPKNADANGAYNIARKVLWAIGQFKKAEDEKLDKVKIAISNKEWLEYAQTSVKH

SEQ ID NO: 4 - protein, 239 aa, synthetic construct
  REGION 1..239: note = SYNTHETIC SEQUENCE
MVSKGEELFTGVVPILVELDGDVNGHKFSVSGEGEGDATYGKLTLKFICTTGKLPVPWPTLVTTLTYGVQCFSRYPDHMKQHDFFKSAMPEGYVQERTIFFKDDGNYKTRAEVKFEGDTLVNRIELKGIDFKEDGNILGHKLEYNYNSHNVYIMADKQKNGIKVNFKIRHNIEDGSVQLADHYQQNTPIGDGPVLLPDNHYLSTQSALSKDPNEKRDHMVLLEFVTAAGITLGMDELYK

SEQ ID NO: 5 - protein, 236 aa, synthetic construct
  REGION 1..236: note = SYNTHETIC SEQUENCE
MVSKGEEDNMAIIKEFMRFKVHMEGSVNGHEFEIEGEGEGRPYEGTQTAKLKVTKGGPLPFAWDILSPQFMYGSKAYVKHPADIPDYLKLSFPEGFKWERVMNFEDGGVVTVTQDSSLQDGEFIYKVKLRGTNFPSDGPVMQKKTMGWEASSERMYPEDGALKGEIKQRLKLKDGGHYDAEVKTTYKAKKPVQLPGAYNVNIKLDITSHNEDYTIVEQYERAEGRHSTGGMDELYK

SEQ ID NO: 6 - protein, 12 aa, synthetic construct
  REGION 1..12: note = SYNTHETIC
GSAGSAAGSGEF

SEQ ID NO: 7 - protein, 20 aa, synthetic construct
  REGION 1..20: note = SYNTHETIC
GGGGSGGGGSGGGGSGGGGS

SEQ ID NO: 8 - protein, 22 aa, synthetic construct
  REGION 1..22: note = SYNTHETIC
AEAAAKEAAAKEAAAKEAAAKA

SEQ ID NO: 9 - protein, 46 aa, synthetic construct
  REGION 1..46: note = SYNTHETIC
AEAAAKEAAAKEAAAKEAAAKALEAEAAAKEAAAKEAAAKEAAAKA

SEQ ID NO: 10 - protein, 50 aa, synthetic construct
  REGION 1..50: note = SYNTHETIC
LEAEAAAKEAAAKEAAAKEAAAKALEAEAAAKEAAAKEAAAKEAAAKALE

SEQ ID NO: 11 - protein, 5 aa, synthetic construct
  REGION 1..5: note = SYNTHETIC
APAPA

SEQ ID NO: 12 - protein, 7 aa, synthetic construct
  REGION 1..7: note = SYNTHETIC
APAPAPA

SEQ ID NO: 13 - protein, 9 aa, synthetic construct
  REGION 1..9: note = SYHTHETIC
APAPAPAPA

SEQ ID NO: 14 - protein, 11 aa, synthetic construct
  REGION 1..11: note = SYNTHETIC
APAPAPAPAPA

SEQ ID NO: 15 - protein, 13 aa, synthetic construct
  REGION 1..13: note = SYNTHETIC
APAPAPAPAPAPA

SEQ ID NO: 16 - protein, 15 aa, synthetic construct
  REGION 1..15: note = SYNTHETIC
APAPAPAPAPAPAPA

SEQ ID NO: 17 - protein, 17 aa, synthetic construct
  REGION 1..17: note = SYNTHETIC
APAPAPAPAPAPAPAPA

SEQ ID NO: 18 - protein, 19 aa, synthetic construct
  REGION 1..19: note = SYNTHETIC
APAPAPAPAPAPAPAPAPA

SEQ ID NO: 19 - protein, 21 aa, synthetic construct
  REGION 1..21: note = SYNTHETIC
APAPAPAPAPAPAPAPAPAPA

SEQ ID NO: 20 - protein, 23 aa, synthetic construct
  REGION 1..23: note = SYNTHETIC
APAPAPAPAPAPAPAPAPAPAPA

SEQ ID NO: 21 - protein, 25 aa, synthetic construct
  REGION 1..25: note = SYNTHETIC
APAPAPAPAPAPAPAPAPAPAPAPA

SEQ ID NO: 22 - protein, 27 aa, synthetic construct
  REGION 1..27: note = SYNTHETIC
APAPAPAPAPAPAPAPAPAPAPAPAPA

SEQ ID NO: 23 - protein, 29 aa, synthetic construct
  REGION 1..29: note = SYNTHETIC
APAPAPAPAPAPAPAPAPAPAPAPAPAPA

SEQ ID NO: 24-25 - skipped (2 entries)

SEQ ID NO: 26 - protein, 8 aa, synthetic construct
  REGION 1..8: note = SYNTHETIC
  VARIANT 1: note = X can be any naturally occurring amino acid
  VARIANT 3: note = X can be any naturally occurring amino acid
  VARIANT 5: note = X can be any naturally occurring amino acid
  VARIANT 7: note = X can be any naturally occurring amino acid
XPXPXPXP

SEQ ID NO: 27 - protein, 10 aa, synthetic construct
  REGION 1..10: note = SYNTHETIC
  VARIANT 1: note = X can be any naturally occurring amino acid
  VARIANT 3: note = X can be any naturally occurring amino acid
  VARIANT 5: note = X can be any naturally occurring amino acid
  VARIANT 7: note = X can be any naturally occurring amino acid
  VARIANT 9: note = X can be any naturally occurring amino acid
XPXPXPXPXP

SEQ ID NO: 28 - protein, 12 aa, synthetic construct
  REGION 1..12: note = SYNTHETIC
  VARIANT 1: note = X can be any naturally occurring amino acid
  VARIANT 3: note = X can be any naturally occurring amino acid
  VARIANT 5: note = X can be any naturally occurring amino acid
  VARIANT 7: note = X can be any naturally occurring amino acid
  VARIANT 9: note = X can be any naturally occurring amino acid
  VARIANT 11: note = X can be any naturally occurring amino acid
XPXPXPXPXPXP

SEQ ID NO: 29 - protein, 14 aa, synthetic construct
  REGION 1..14: note = SYNTHETIC
  VARIANT 1: note = X can be any naturally occurring amino acid
  VARIANT 3: note = X can be any naturally occurring amino acid
  VARIANT 5: note = X can be any naturally occurring amino acid
  VARIANT 7: note = X can be any naturally occurring amino acid
  VARIANT 9: note = X can be any naturally occurring amino acid
  VARIANT 11: note = X can be any naturally occurring amino acid
  VARIANT 13: note = X can be any naturally occurring amino acid
XPXPXPXPXPXPXP

SEQ ID NO: 30 - protein, 16 aa, synthetic construct
  REGION 1..16: note = SYNTHETIC
  VARIANT 1: note = X can be any naturally occurring amino acid
  VARIANT 3: note = X can be any naturally occurring amino acid
  VARIANT 5: note = X can be any naturally occurring amino acid
  VARIANT 7: note = X can be any naturally occurring amino acid
  VARIANT 9: note = X can be any naturally occurring amino acid
  VARIANT 11: note = X can be any naturally occurring amino acid
  VARIANT 13: note = X can be any naturally occurring amino acid
  VARIANT 15: note = X can be any naturally occurring amino acid
XPXPXPXPXPXPXPXP

SEQ ID NO: 31 - protein, 18 aa, synthetic construct
  REGION 1..18: note = SYNTHETIC
  VARIANT 1: note = X can be any naturally occurring amino acid
  VARIANT 3: note = X can be any naturally occurring amino acid
  VARIANT 5: note = X can be any naturally occurring amino acid
  VARIANT 7: note = X can be any naturally occurring amino acid
  VARIANT 9: note = X can be any naturally occurring amino acid
  VARIANT 11: note = X can be any naturally occurring amino acid
  VARIANT 13: note = X can be any naturally occurring amino acid
  VARIANT 15: note = X can be any naturally occurring amino acid
  VARIANT 17: note = X can be any naturally occurring amino acid
XPXPXPXPXPXPXPXPXP

SEQ ID NO: 32 - protein, 20 aa, synthetic construct
  REGION 1..20: note = SYNTHETIC
  VARIANT 1: note = X can be any naturally occurring amino acid
  VARIANT 3: note = X can be any naturally occurring amino acid
  VARIANT 5: note = X can be any naturally occurring amino acid
  VARIANT 7: note = X can be any naturally occurring amino acid
  VARIANT 9: note = X can be any naturally occurring amino acid
  VARIANT 11: note = X can be any naturally occurring amino acid
  VARIANT 13: note = X can be any naturally occurring amino acid
  VARIANT 15: note = X can be any naturally occurring amino acid
  VARIANT 17: note = X can be any naturally occurring amino acid
  VARIANT 19: note = X can be any naturally occurring amino acid
XPXPXPXPXPXPXPXPXPXP

SEQ ID NO: 33 - protein, 22 aa, synthetic construct
  REGION 1..22: note = SYNTHETIC
  VARIANT 1: note = X can be any naturally occurring amino acid
  VARIANT 3: note = X can be any naturally occurring amino acid
  VARIANT 5: note = X can be any naturally occurring amino acid
  VARIANT 7: note = X can be any naturally occurring amino acid
  VARIANT 9: note = X can be any naturally occurring amino acid
  VARIANT 11: note = X can be any naturally occurring amino acid
  VARIANT 13: note = X can be any naturally occurring amino acid
  VARIANT 15: note = X can be any naturally occurring amino acid
  VARIANT 17: note = X can be any naturally occurring amino acid
  VARIANT 19: note = X can be any naturally occurring amino acid
  VARIANT 21: note = X can be any naturally occurring amino acid
XPXPXPXPXPXPXPXPXPXPXP

SEQ ID NO: 34 - protein, 24 aa, synthetic construct
  REGION 1..24: note = SYNTHETIC
  VARIANT 1: note = X can be any naturally occurring amino acid
  VARIANT 3: note = X can be any naturally occurring amino acid
  VARIANT 5: note = X can be any naturally occurring amino acid
  VARIANT 7: note = X can be any naturally occurring amino acid
  VARIANT 9: note = X can be any naturally occurring amino acid
  VARIANT 11: note = X can be any naturally occurring amino acid
  VARIANT 13: note = X can be any naturally occurring amino acid
  VARIANT 15: note = X can be any naturally occurring amino acid
  VARIANT 17: note = X can be any naturally occurring amino acid
  VARIANT 19: note = X can be any naturally occurring amino acid
  VARIANT 21: note = X can be any naturally occurring amino acid
  VARIANT 23: note = X can be any naturally occurring amino acid
XPXPXPXPXPXPXPXPXPXPXPXP

SEQ ID NO: 35 - protein, 26 aa, synthetic construct
  REGION 1..26: note = SYNTHETIC
  VARIANT 1: note = X can be any naturally occurring amino acid
  VARIANT 3: note = X can be any naturally occurring amino acid
  VARIANT 5: note = X can be any naturally occurring amino acid
  VARIANT 7: note = X can be any naturally occurring amino acid
  VARIANT 9: note = X can be any naturally occurring amino acid
  VARIANT 11: note = X can be any naturally occurring amino acid
  VARIANT 13: note = X can be any naturally occurring amino acid
  VARIANT 15: note = X can be any naturally occurring amino acid
  VARIANT 17: note = X can be any naturally occurring amino acid
  VARIANT 19: note = X can be any naturally occurring amino acid
  VARIANT 21: note = X can be any naturally occurring amino acid
  VARIANT 23: note = X can be any naturally occurring amino acid
  VARIANT 25: note = X can be any naturally occurring amino acid
XPXPXPXPXPXPXPXPXPXPXPXPXP

SEQ ID NO: 36 - protein, 28 aa, synthetic construct
  REGION 1..28: note = SYNTHETIC
  VARIANT 1: note = X can be any naturally occurring amino acid
  VARIANT 3: note = X can be any naturally occurring amino acid
  VARIANT 5: note = X can be any naturally occurring amino acid
  VARIANT 7: note = X can be any naturally occurring amino acid
  VARIANT 9: note = X can be any naturally occurring amino acid
  VARIANT 11: note = X can be any naturally occurring amino acid
  VARIANT 13: note = X can be any naturally occurring amino acid
  VARIANT 15: note = X can be any naturally occurring amino acid
  VARIANT 17: note = X can be any naturally occurring amino acid
  VARIANT 19: note = X can be any naturally occurring amino acid
  VARIANT 21: note = X can be any naturally occurring amino acid
  VARIANT 23: note = X can be any naturally occurring amino acid
  VARIANT 25: note = X can be any naturally occurring amino acid
  VARIANT 27: note = X can be any naturally occurring amino acid
XPXPXPXPXPXPXPXPXPXPXPXPXPXP

SEQ ID NO: 37 - protein, 15 aa, synthetic construct
  REGION 1..15: note = SYNTHETIC
GGGGSEAAAKGGGGS

SEQ ID NO: 38 - protein, 1619 aa, synthetic construct
  REGION 1..1619: note = SYNTHETIC
MDKKYSIGLDIGTNSVGWAVITDEYKVPSKKFKVLGNTDRHSIKKNLIGALLFDSGETAEATRLKRTARRRYTRRKNRICYLQEIFSNEMAKVDDSFFHRLEESFLVEEDKKHERHPIFGNIVDEVAYHEKYPTIYHLRKKLVDSTDKADLRLIYLALAHMIKFRGHFLIEGDLNPDNSDVDKLFIQLVQTYNQLFEENPINASGVDAKAILSARLSKSRRLENLIAQLPGEKKNGLFGNLIALSLGLTPNFKSNFDLAEDAKLQLSKDTYDDDLDNLLAQIGDQYADLFLAAKNLSDAILLSDILRVNTEITKAPLSASMIKRYDEHHQDLTLLKALVRQQLPEKYKEIFFDQSKNGYAGYIDGGASQEEFYKFIKPILEKMDGTEELLVKLNREDLLRKQRTFDNGSIPHQIHLGELHAILRRQEDFYPFLKDNREKIEKILTFRIPYYVGPLARGNSRFAWMTRKSEETITPWNFEEVVDKGASAQSFIERMTNFDKNLPNEKVLPKHSLLYEYFTVYNELTKVKYVTEGMRKPAFLSGEQKKAIVDLLFKTNRKVTVKQLKEDYFKKIECFDSVEISGVEDRFNASLGTYHDLLKIIKDKDFLDNEENEDILEDIVLTLTLFEDREMIEERLKTYAHLFDDKVMKQLKRRRYTGWGRLSRKLINGIRDKQSGKTILDFLKSDGFANRNFMQLIHDDSLTFKEDIQKAQVSGQGDSLHEHIANLAGSPAIKKGILQTVKVVDELVKVMGRHKPENIVIEMARENQTTQKGQKNSRERMKRIEEGIKELGSQILKEHPVENTQLQNEKLYLYYLQNGRDMYVDQELDINRLSDYDVDHIVPQSFLKDDSIDNKVLTRSDKNRGKSDNVPSEEVVKKMKNYWRQLLNAKLITQRKFDNLTKAERGGLSELDKAGFIKRQLVETRQITKHVAQILDSRMNTKYDENDKLIREVKVITLKSKLVSDFRKDFQFYKVREINNYHHAHDAYLNAVVGTALIKKYPKLESEFVYGDYKVYDVRKMIAKSEQEIGKATAKYFFYSNIMNFFKTEITLANGEIRKRPLIETNGETGEIVWDKGRDFATVRKVLSMPQVNIVKKTEVQTGGFSKESILPKRNSDKLIARKKDWDPKKYGGFDSPTVAYSVLVVAKVEKGKSKKLKSVKELLGITIMERSSFEKNPIDFLEAKGYKEVKKDLIIKLPKYSLFELENGRKRMLASAGELQKGNELALPSKYVNFLYLASHYEKLKGSPEDNEQKQLFVEQHKHYLDEIIEQISEFSKRVILADANLDKVLSAYNKHRDKPIREQAENIIHLFTLTNLGAPAAFKYFDTTIDRKRYTSTKEVLDATLIHQSITGLYETRIDLSQLGGDGSAGSAAGSGEFMVSKGEELFTGVVPILVELDGDVNGHKFSVSGEGEGDATYGKLTLKFICTTGKLPVPWPTLVTTLTYGVQCFSRYPDHMKQHDFFKSAMPEGYVQERTIFFKDDGNYKTRAEVKFEGDTLVNRIELKGIDFKEDGNILGHKLEYNYNSHNVYIMADKQKNGIKVNFKIRHNIEDGSVQLADHYQQNTPIGDGPVLLPDNHYLSTQSALSKDPNEKRDHMVLLEFVTAAGITLGMDELYK

SEQ ID NO: 39 - protein, 1627 aa, synthetic construct
  REGION 1..1627: note = SYNTHETIC
MDKKYSIGLDIGTNSVGWAVITDEYKVPSKKFKVLGNTDRHSIKKNLIGALLFDSGETAEATRLKRTARRRYTRRKNRICYLQEIFSNEMAKVDDSFFHRLEESFLVEEDKKHERHPIFGNIVDEVAYHEKYPTIYHLRKKLVDSTDKADLRLIYLALAHMIKFRGHFLIEGDLNPDNSDVDKLFIQLVQTYNQLFEENPINASGVDAKAILSARLSKSRRLENLIAQLPGEKKNGLFGNLIALSLGLTPNFKSNFDLAEDAKLQLSKDTYDDDLDNLLAQIGDQYADLFLAAKNLSDAILLSDILRVNTEITKAPLSASMIKRYDEHHQDLTLLKALVRQQLPEKYKEIFFDQSKNGYAGYIDGGASQEEFYKFIKPILEKMDGTEELLVKLNREDLLRKQRTFDNGSIPHQIHLGELHAILRRQEDFYPFLKDNREKIEKILTFRIPYYVGPLARGNSRFAWMTRKSEETITPWNFEEVVDKGASAQSFIERMTNFDKNLPNEKVLPKHSLLYEYFTVYNELTKVKYVTEGMRKPAFLSGEQKKAIVDLLFKTNRKVTVKQLKEDYFKKIECFDSVEISGVEDRFNASLGTYHDLLKIIKDKDFLDNEENEDILEDIVLTLTLFEDREMIEERLKTYAHLFDDKVMKQLKRRRYTGWGRLSRKLINGIRDKQSGKTILDFLKSDGFANRNFMQLIHDDSLTFKEDIQKAQVSGQGDSLHEHIANLAGSPAIKKGILQTVKVVDELVKVMGRHKPENIVIEMARENQTTQKGQKNSRERMKRIEEGIKELGSQILKEHPVENTQLQNEKLYLYYLQNGRDMYVDQELDINRLSDYDVDHIVPQSFLKDDSIDNKVLTRSDKNRGKSDNVPSEEVVKKMKNYWRQLLNAKLITQRKFDNLTKAERGGLSELDKAGFIKRQLVETRQITKHVAQILDSRMNTKYDENDKLIREVKVITLKSKLVSDFRKDFQFYKVREINNYHHAHDAYLNAVVGTALIKKYPKLESEFVYGDYKVYDVRKMIAKSEQEIGKATAKYFFYSNIMNFFKTEITLANGEIRKRPLIETNGETGEIVWDKGRDFATVRKVLSMPQVNIVKKTEVQTGGFSKESILPKRNSDKLIARKKDWDPKKYGGFDSPTVAYSVLVVAKVEKGKSKKLKSVKELLGITIMERSSFEKNPIDFLEAKGYKEVKKDLIIKLPKYSLFELENGRKRMLASAGELQKGNELALPSKYVNFLYLASHYEKLKGSPEDNEQKQLFVEQHKHYLDEIIEQISEFSKRVILADANLDKVLSAYNKHRDKPIREQAENIIHLFTLTNLGAPAAFKYFDTTIDRKRYTSTKEVLDATLIHQSITGLYETRIDLSQLGGDGGGGSGGGGSGGGGSGGGGSMVSKGEELFTGVVPILVELDGDVNGHKFSVSGEGEGDATYGKLTLKFICTTGKLPVPWPTLVTTLTYGVQCFSRYPDHMKQHDFFKSAMPEGYVQERTIFFKDDGNYKTRAEVKFEGDTLVNRIELKGIDFKEDGNILGHKLEYNYNSHNVYIMADKQKNGIKVNFKIRHNIEDGSVQLADHYQQNTPIGDGPVLLPDNHYLSTQSALSKDPNEKRDHMVLLEFVTAAGITLGMDELYK

SEQ ID NO: 40 - protein, 1629 aa, synthetic construct
  REGION 1..1629: note = SYNTHETIC
MDKKYSIGLDIGTNSVGWAVITDEYKVPSKKFKVLGNTDRHSIKKNLIGALLFDSGETAEATRLKRTARRRYTRRKNRICYLQEIFSNEMAKVDDSFFHRLEESFLVEEDKKHERHPIFGNIVDEVAYHEKYPTIYHLRKKLVDSTDKADLRLIYLALAHMIKFRGHFLIEGDLNPDNSDVDKLFIQLVQTYNQLFEENPINASGVDAKAILSARLSKSRRLENLIAQLPGEKKNGLFGNLIALSLGLTPNFKSNFDLAEDAKLQLSKDTYDDDLDNLLAQIGDQYADLFLAAKNLSDAILLSDILRVNTEITKAPLSASMIKRYDEHHQDLTLLKALVRQQLPEKYKEIFFDQSKNGYAGYIDGGASQEEFYKFIKPILEKMDGTEELLVKLNREDLLRKQRTFDNGSIPHQIHLGELHAILRRQEDFYPFLKDNREKIEKILTFRIPYYVGPLARGNSRFAWMTRKSEETITPWNFEEVVDKGASAQSFIERMTNFDKNLPNEKVLPKHSLLYEYFTVYNELTKVKYVTEGMRKPAFLSGEQKKAIVDLLFKTNRKVTVKQLKEDYFKKIECFDSVEISGVEDRFNASLGTYHDLLKIIKDKDFLDNEENEDILEDIVLTLTLFEDREMIEERLKTYAHLFDDKVMKQLKRRRYTGWGRLSRKLINGIRDKQSGKTILDFLKSDGFANRNFMQLIHDDSLTFKEDIQKAQVSGQGDSLHEHIANLAGSPAIKKGILQTVKVVDELVKVMGRHKPENIVIEMARENQTTQKGQKNSRERMKRIEEGIKELGSQILKEHPVENTQLQNEKLYLYYLQNGRDMYVDQELDINRLSDYDVDHIVPQSFLKDDSIDNKVLTRSDKNRGKSDNVPSEEVVKKMKNYWRQLLNAKLITQRKFDNLTKAERGGLSELDKAGFIKRQLVETRQITKHVAQILDSRMNTKYDENDKLIREVKVITLKSKLVSDFRKDFQFYKVREINNYHHAHDAYLNAVVGTALIKKYPKLESEFVYGDYKVYDVRKMIAKSEQEIGKATAKYFFYSNIMNFFKTEITLANGEIRKRPLIETNGETGEIVWDKGRDFATVRKVLSMPQVNIVKKTEVQTGGFSKESILPKRNSDKLIARKKDWDPKKYGGFDSPTVAYSVLVVAKVEKGKSKKLKSVKELLGITIMERSSFEKNPIDFLEAKGYKEVKKDLIIKLPKYSLFELENGRKRMLASAGELQKGNELALPSKYVNFLYLASHYEKLKGSPEDNEQKQLFVEQHKHYLDEIIEQISEFSKRVILADANLDKVLSAYNKHRDKPIREQAENIIHLFTLTNLGAPAAFKYFDTTIDRKRYTSTKEVLDATLIHQSITGLYETRIDLSQLGGDAEAAAKEAAAKEAAAKEAAAKAMVSKGEELFTGVVPILVELDGDVNGHKFSVSGEGEGDATYGKLTLKFICTTGKLPVPWPTLVTTLTYGVQCFSRYPDHMKQHDFFKSAMPEGYVQERTIFFKDDGNYKTRAEVKFEGDTLVNRIELKGIDFKEDGNILGHKLEYNYNSHNVYIMADKQKNGIKVNFKIRHNIEDGSVQLADHYQQNTPIGDGPVLLPDNHYLSTQSALSKDPNEKRDHMVLLEFVTAAGITLGMDELYK

SEQ ID NO: 41 - protein, 1653 aa, synthetic construct
  REGION 1..1653: note = SYNTHETIC
MDKKYSIGLDIGTNSVGWAVITDEYKVPSKKFKVLGNTDRHSIKKNLIGALLFDSGETAEATRLKRTARRRYTRRKNRICYLQEIFSNEMAKVDDSFFHRLEESFLVEEDKKHERHPIFGNIVDEVAYHEKYPTIYHLRKKLVDSTDKADLRLIYLALAHMIKFRGHFLIEGDLNPDNSDVDKLFIQLVQTYNQLFEENPINASGVDAKAILSARLSKSRRLENLIAQLPGEKKNGLFGNLIALSLGLTPNFKSNFDLAEDAKLQLSKDTYDDDLDNLLAQIGDQYADLFLAAKNLSDAILLSDILRVNTEITKAPLSASMIKRYDEHHQDLTLLKALVRQQLPEKYKEIFFDQSKNGYAGYIDGGASQEEFYKFIKPILEKMDGTEELLVKLNREDLLRKQRTFDNGSIPHQIHLGELHAILRRQEDFYPFLKDNREKIEKILTFRIPYYVGPLARGNSRFAWMTRKSEETITPWNFEEVVDKGASAQSFIERMTNFDKNLPNEKVLPKHSLLYEYFTVYNELTKVKYVTEGMRKPAFLSGEQKKAIVDLLFKTNRKVTVKQLKEDYFKKIECFDSVEISGVEDRFNASLGTYHDLLKIIKDKDFLDNEENEDILEDIVLTLTLFEDREMIEERLKTYAHLFDDKVMKQLKRRRYTGWGRLSRKLINGIRDKQSGKTILDFLKSDGFANRNFMQLIHDDSLTFKEDIQKAQVSGQGDSLHEHIANLAGSPAIKKGILQTVKVVDELVKVMGRHKPENIVIEMARENQTTQKGQKNSRERMKRIEEGIKELGSQILKEHPVENTQLQNEKLYLYYLQNGRDMYVDQELDINRLSDYDVDHIVPQSFLKDDSIDNKVLTRSDKNRGKSDNVPSEEVVKKMKNYWRQLLNAKLITQRKFDNLTKAERGGLSELDKAGFIKRQLVETRQITKHVAQILDSRMNTKYDENDKLIREVKVITLKSKLVSDFRKDFQFYKVREINNYHHAHDAYLNAVVGTALIKKYPKLESEFVYGDYKVYDVRKMIAKSEQEIGKATAKYFFYSNIMNFFKTEITLANGEIRKRPLIETNGETGEIVWDKGRDFATVRKVLSMPQVNIVKKTEVQTGGFSKESILPKRNSDKLIARKKDWDPKKYGGFDSPTVAYSVLVVAKVEKGKSKKLKSVKELLGITIMERSSFEKNPIDFLEAKGYKEVKKDLIIKLPKYSLFELENGRKRMLASAGELQKGNELALPSKYVNFLYLASHYEKLKGSPEDNEQKQLFVEQHKHYLDEIIEQISEFSKRVILADANLDKVLSAYNKHRDKPIREQAENIIHLFTLTNLGAPAAFKYFDTTIDRKRYTSTKEVLDATLIHQSITGLYETRIDLSQLGGDAEAAAKEAAAKEAAAKEAAAKALEAEAAAKEAAAKEAAAKEAAAKAMVSKGEELFTGVVPILVELDGDVNGHKFSVSGEGEGDATYGKLTLKFICTTGKLPVPWPTLVTTLTYGVQCFSRYPDHMKQHDFFKSAMPEGYVQERTIFFKDDGNYKTRAEVKFEGDTLVNRIELKGIDFKEDGNILGHKLEYNYNSHNVYIMADKQKNGIKVNFKIRHNIEDGSVQLADHYQQNTPIGDGPVLLPDNHYLSTQSALSKDPNEKRDHMVLLEFVTAAGITLGMDELYK

SEQ ID NO: 42 - protein, 1657 aa, synthetic construct
  REGION 1..1657: note = SYNTHETIC
MDKKYSIGLDIGTNSVGWAVITDEYKVPSKKFKVLGNTDRHSIKKNLIGALLFDSGETAEATRLKRTARRRYTRRKNRICYLQEIFSNEMAKVDDSFFHRLEESFLVEEDKKHERHPIFGNIVDEVAYHEKYPTIYHLRKKLVDSTDKADLRLIYLALAHMIKFRGHFLIEGDLNPDNSDVDKLFIQLVQTYNQLFEENPINASGVDAKAILSARLSKSRRLENLIAQLPGEKKNGLFGNLIALSLGLTPNFKSNFDLAEDAKLQLSKDTYDDDLDNLLAQIGDQYADLFLAAKNLSDAILLSDILRVNTEITKAPLSASMIKRYDEHHQDLTLLKALVRQQLPEKYKEIFFDQSKNGYAGYIDGGASQEEFYKFIKPILEKMDGTEELLVKLNREDLLRKQRTFDNGSIPHQIHLGELHAILRRQEDFYPFLKDNREKIEKILTFRIPYYVGPLARGNSRFAWMTRKSEETITPWNFEEVVDKGASAQSFIERMTNFDKNLPNEKVLPKHSLLYEYFTVYNELTKVKYVTEGMRKPAFLSGEQKKAIVDLLFKTNRKVTVKQLKEDYFKKIECFDSVEISGVEDRFNASLGTYHDLLKIIKDKDFLDNEENEDILEDIVLTLTLFEDREMIEERLKTYAHLFDDKVMKQLKRRRYTGWGRLSRKLINGIRDKQSGKTILDFLKSDGFANRNFMQLIHDDSLTFKEDIQKAQVSGQGDSLHEHIANLAGSPAIKKGILQTVKVVDELVKVMGRHKPENIVIEMARENQTTQKGQKNSRERMKRIEEGIKELGSQILKEHPVENTQLQNEKLYLYYLQNGRDMYVDQELDINRLSDYDVDHIVPQSFLKDDSIDNKVLTRSDKNRGKSDNVPSEEVVKKMKNYWRQLLNAKLITQRKFDNLTKAERGGLSELDKAGFIKRQLVETRQITKHVAQILDSRMNTKYDENDKLIREVKVITLKSKLVSDFRKDFQFYKVREINNYHHAHDAYLNAVVGTALIKKYPKLESEFVYGDYKVYDVRKMIAKSEQEIGKATAKYFFYSNIMNFFKTEITLANGEIRKRPLIETNGETGEIVWDKGRDFATVRKVLSMPQVNIVKKTEVQTGGFSKESILPKRNSDKLIARKKDWDPKKYGGFDSPTVAYSVLVVAKVEKGKSKKLKSVKELLGITIMERSSFEKNPIDFLEAKGYKEVKKDLIIKLPKYSLFELENGRKRMLASAGELQKGNELALPSKYVNFLYLASHYEKLKGSPEDNEQKQLFVEQHKHYLDEIIEQISEFSKRVILADANLDKVLSAYNKHRDKPIREQAENIIHLFTLTNLGAPAAFKYFDTTIDRKRYTSTKEVLDATLIHQSITGLYETRIDLSQLGGDLEAEAAAKEAAAKEAAAKEAAAKALEAEAAAKEAAAKEAAAKEAAAKALEMVSKGEELFTGVVPILVELDGDVNGHKFSVSGEGEGDATYGKLTLKFICTTGKLPVPWPTLVTTLTYGVQCFSRYPDHMKQHDFFKSAMPEGYVQERTIFFKDDGNYKTRAEVKFEGDTLVNRIELKGIDFKEDGNILGHKLEYNYNSHNVYIMADKQKNGIKVNFKIRHNIEDGSVQLADHYQQNTPIGDGPVLLPDNHYLSTQSALSKDPNEKRDHMVLLEFVTAAGITLGMDELYK

SEQ ID NO: 43 - protein, 1610 aa, synthetic construct
  REGION 1..1610: note = SYNTHETIC
MDKKYSIGLDIGTNSVGWAVITDEYKVPSKKFKVLGNTDRHSIKKNLIGALLFDSGETAEATRLKRTARRRYTRRKNRICYLQEIFSNEMAKVDDSFFHRLEESFLVEEDKKHERHPIFGNIVDEVAYHEKYPTIYHLRKKLVDSTDKADLRLIYLALAHMIKFRGHFLIEGDLNPDNSDVDKLFIQLVQTYNQLFEENPINASGVDAKAILSARLSKSRRLENLIAQLPGEKKNGLFGNLIALSLGLTPNFKSNFDLAEDAKLQLSKDTYDDDLDNLLAQIGDQYADLFLAAKNLSDAILLSDILRVNTEITKAPLSASMIKRYDEHHQDLTLLKALVRQQLPEKYKEIFFDQSKNGYAGYIDGGASQEEFYKFIKPILEKMDGTEELLVKLNREDLLRKQRTFDNGSIPHQIHLGELHAILRRQEDFYPFLKDNREKIEKILTFRIPYYVGPLARGNSRFAWMTRKSEETITPWNFEEVVDKGASAQSFIERMTNFDKNLPNEKVLPKHSLLYEYFTVYNELTKVKYVTEGMRKPAFLSGEQKKAIVDLLFKTNRKVTVKQLKEDYFKKIECFDSVEISGVEDRFNASLGTYHDLLKIIKDKDFLDNEENEDILEDIVLTLTLFEDREMIEERLKTYAHLFDDKVMKQLKRRRYTGWGRLSRKLINGIRDKQSGKTILDFLKSDGFANRNFMQLIHDDSLTFKEDIQKAQVSGQGDSLHEHIANLAGSPAIKKGILQTVKVVDELVKVMGRHKPENIVIEMARENQTTQKGQKNSRERMKRIEEGIKELGSQILKEHPVENTQLQNEKLYLYYLQNGRDMYVDQELDINRLSDYDVDHIVPQSFLKDDSIDNKVLTRSDKNRGKSDNVPSEEVVKKMKNYWRQLLNAKLITQRKFDNLTKAERGGLSELDKAGFIKRQLVETRQITKHVAQILDSRMNTKYDENDKLIREVKVITLKSKLVSDFRKDFQFYKVREINNYHHAHDAYLNAVVGTALIKKYPKLESEFVYGDYKVYDVRKMIAKSEQEIGKATAKYFFYSNIMNFFKTEITLANGEIRKRPLIETNGETGEIVWDKGRDFATVRKVLSMPQVNIVKKTEVQTGGFSKESILPKRNSDKLIARKKDWDPKKYGGFDSPTVAYSVLVVAKVEKGKSKKLKSVKELLGITIMERSSFEKNPIDFLEAKGYKEVKKDLIIKLPKYSLFELENGRKRMLASAGELQKGNELALPSKYVNFLYLASHYEKLKGSPEDNEQKQLFVEQHKHYLDEIIEQISEFSKRVILADANLDKVLSAYNKHRDKPIREQAENIIHLFTLTNLGAPAAFKYFDTTIDRKRYTSTKEVLDATLIHQSITGLYETRIDLSQLGGDAPAMVSKGEELFTGVVPILVELDGDVNGHKFSVSGEGEGDATYGKLTLKFICTTGKLPVPWPTLVTTLTYGVQCFSRYPDHMKQHDFFKSAMPEGYVQERTIFFKDDGNYKTRAEVKFEGDTLVNRIELKGIDFKEDGNILGHKLEYNYNSHNVYIMADKQKNGIKVNFKIRHNIEDGSVQLADHYQQNTPIGDGPVLLPDNHYLSTQSALSKDPNEKRDHMVLLEFVTAAGITLGMDELYK

SEQ ID NO: 44 - protein, 1612 aa, synthetic construct
  REGION 1..1612: note = SYNTHETIC
MDKKYSIGLDIGTNSVGWAVITDEYKVPSKKFKVLGNTDRHSIKKNLIGALLFDSGETAEATRLKRTARRRYTRRKNRICYLQEIFSNEMAKVDDSFFHRLEESFLVEEDKKHERHPIFGNIVDEVAYHEKYPTIYHLRKKLVDSTDKADLRLIYLALAHMIKFRGHFLIEGDLNPDNSDVDKLFIQLVQTYNQLFEENPINASGVDAKAILSARLSKSRRLENLIAQLPGEKKNGLFGNLIALSLGLTPNFKSNFDLAEDAKLQLSKDTYDDDLDNLLAQIGDQYADLFLAAKNLSDAILLSDILRVNTEITKAPLSASMIKRYDEHHQDLTLLKALVRQQLPEKYKEIFFDQSKNGYAGYIDGGASQEEFYKFIKPILEKMDGTEELLVKLNREDLLRKQRTFDNGSIPHQIHLGELHAILRRQEDFYPFLKDNREKIEKILTFRIPYYVGPLARGNSRFAWMTRKSEETITPWNFEEVVDKGASAQSFIERMTNFDKNLPNEKVLPKHSLLYEYFTVYNELTKVKYVTEGMRKPAFLSGEQKKAIVDLLFKTNRKVTVKQLKEDYFKKIECFDSVEISGVEDRFNASLGTYHDLLKIIKDKDFLDNEENEDILEDIVLTLTLFEDREMIEERLKTYAHLFDDKVMKQLKRRRYTGWGRLSRKLINGIRDKQSGKTILDFLKSDGFANRNFMQLIHDDSLTFKEDIQKAQVSGQGDSLHEHIANLAGSPAIKKGILQTVKVVDELVKVMGRHKPENIVIEMARENQTTQKGQKNSRERMKRIEEGIKELGSQILKEHPVENTQLQNEKLYLYYLQNGRDMYVDQELDINRLSDYDVDHIVPQSFLKDDSIDNKVLTRSDKNRGKSDNVPSEEVVKKMKNYWRQLLNAKLITQRKFDNLTKAERGGLSELDKAGFIKRQLVETRQITKHVAQILDSRMNTKYDENDKLIREVKVITLKSKLVSDFRKDFQFYKVREINNYHHAHDAYLNAVVGTALIKKYPKLESEFVYGDYKVYDVRKMIAKSEQEIGKATAKYFFYSNIMNFFKTEITLANGEIRKRPLIETNGETGEIVWDKGRDFATVRKVLSMPQVNIVKKTEVQTGGFSKESILPKRNSDKLIARKKDWDPKKYGGFDSPTVAYSVLVVAKVEKGKSKKLKSVKELLGITIMERSSFEKNPIDFLEAKGYKEVKKDLIIKLPKYSLFELENGRKRMLASAGELQKGNELALPSKYVNFLYLASHYEKLKGSPEDNEQKQLFVEQHKHYLDEIIEQISEFSKRVILADANLDKVLSAYNKHRDKPIREQAENIIHLFTLTNLGAPAAFKYFDTTIDRKRYTSTKEVLDATLIHQSITGLYETRIDLSQLGGDAPAPAMVSKGEELFTGVVPILVELDGDVNGHKFSVSGEGEGDATYGKLTLKFICTTGKLPVPWPTLVTTLTYGVQCFSRYPDHMKQHDFFKSAMPEGYVQERTIFFKDDGNYKTRAEVKFEGDTLVNRIELKGIDFKEDGNILGHKLEYNYNSHNVYIMADKQKNGIKVNFKIRHNIEDGSVQLADHYQQNTPIGDGPVLLPDNHYLSTQSALSKDPNEKRDHMVLLEFVTAAGITLGMDELYK

SEQ ID NO: 45 - protein, 1614 aa, synthetic construct
  REGION 1..1614: note = SYNTHETIC
MDKKYSIGLDIGTNSVGWAVITDEYKVPSKKFKVLGNTDRHSIKKNLIGALLFDSGETAEATRLKRTARRRYTRRKNRICYLQEIFSNEMAKVDDSFFHRLEESFLVEEDKKHERHPIFGNIVDEVAYHEKYPTIYHLRKKLVDSTDKADLRLIYLALAHMIKFRGHFLIEGDLNPDNSDVDKLFIQLVQTYNQLFEENPINASGVDAKAILSARLSKSRRLENLIAQLPGEKKNGLFGNLIALSLGLTPNFKSNFDLAEDAKLQLSKDTYDDDLDNLLAQIGDQYADLFLAAKNLSDAILLSDILRVNTEITKAPLSASMIKRYDEHHQDLTLLKALVRQQLPEKYKEIFFDQSKNGYAGYIDGGASQEEFYKFIKPILEKMDGTEELLVKLNREDLLRKQRTFDNGSIPHQIHLGELHAILRRQEDFYPFLKDNREKIEKILTFRIPYYVGPLARGNSRFAWMTRKSEETITPWNFEEVVDKGASAQSFIERMTNFDKNLPNEKVLPKHSLLYEYFTVYNELTKVKYVTEGMRKPAFLSGEQKKAIVDLLFKTNRKVTVKQLKEDYFKKIECFDSVEISGVEDRFNASLGTYHDLLKIIKDKDFLDNEENEDILEDIVLTLTLFEDREMIEERLKTYAHLFDDKVMKQLKRRRYTGWGRLSRKLINGIRDKQSGKTILDFLKSDGFANRNFMQLIHDDSLTFKEDIQKAQVSGQGDSLHEHIANLAGSPAIKKGILQTVKVVDELVKVMGRHKPENIVIEMARENQTTQKGQKNSRERMKRIEEGIKELGSQILKEHPVENTQLQNEKLYLYYLQNGRDMYVDQELDINRLSDYDVDHIVPQSFLKDDSIDNKVLTRSDKNRGKSDNVPSEEVVKKMKNYWRQLLNAKLITQRKFDNLTKAERGGLSELDKAGFIKRQLVETRQITKHVAQILDSRMNTKYDENDKLIREVKVITLKSKLVSDFRKDFQFYKVREINNYHHAHDAYLNAVVGTALIKKYPKLESEFVYGDYKVYDVRKMIAKSEQEIGKATAKYFFYSNIMNFFKTEITLANGEIRKRPLIETNGETGEIVWDKGRDFATVRKVLSMPQVNIVKKTEVQTGGFSKESILPKRNSDKLIARKKDWDPKKYGGFDSPTVAYSVLVVAKVEKGKSKKLKSVKELLGITIMERSSFEKNPIDFLEAKGYKEVKKDLIIKLPKYSLFELENGRKRMLASAGELQKGNELALPSKYVNFLYLASHYEKLKGSPEDNEQKQLFVEQHKHYLDEIIEQISEFSKRVILADANLDKVLSAYNKHRDKPIREQAENIIHLFTLTNLGAPAAFKYFDTTIDRKRYTSTKEVLDATLIHQSITGLYETRIDLSQLGGDAPAPAPAMVSKGEELFTGVVPILVELDGDVNGHKFSVSGEGEGDATYGKLTLKFICTTGKLPVPWPTLVTTLTYGVQCFSRYPDHMKQHDFFKSAMPEGYVQERTIFFKDDGNYKTRAEVKFEGDTLVNRIELKGIDFKEDGNILGHKLEYNYNSHNVYIMADKQKNGIKVNFKIRHNIEDGSVQLADHYQQNTPIGDGPVLLPDNHYLSTQSALSKDPNEKRDHMVLLEFVTAAGITLGMDELYK

SEQ ID NO: 46 - protein, 1616 aa, synthetic construct
  REGION 1..1616: note = SYNTHETIC
MDKKYSIGLDIGTNSVGWAVITDEYKVPSKKFKVLGNTDRHSIKKNLIGALLFDSGETAEATRLKRTARRRYTRRKNRICYLQEIFSNEMAKVDDSFFHRLEESFLVEEDKKHERHPIFGNIVDEVAYHEKYPTIYHLRKKLVDSTDKADLRLIYLALAHMIKFRGHFLIEGDLNPDNSDVDKLFIQLVQTYNQLFEENPINASGVDAKAILSARLSKSRRLENLIAQLPGEKKNGLFGNLIALSLGLTPNFKSNFDLAEDAKLQLSKDTYDDDLDNLLAQIGDQYADLFLAAKNLSDAILLSDILRVNTEITKAPLSASMIKRYDEHHQDLTLLKALVRQQLPEKYKEIFFDQSKNGYAGYIDGGASQEEFYKFIKPILEKMDGTEELLVKLNREDLLRKQRTFDNGSIPHQIHLGELHAILRRQEDFYPFLKDNREKIEKILTFRIPYYVGPLARGNSRFAWMTRKSEETITPWNFEEVVDKGASAQSFIERMTNFDKNLPNEKVLPKHSLLYEYFTVYNELTKVKYVTEGMRKPAFLSGEQKKAIVDLLFKTNRKVTVKQLKEDYFKKIECFDSVEISGVEDRFNASLGTYHDLLKIIKDKDFLDNEENEDILEDIVLTLTLFEDREMIEERLKTYAHLFDDKVMKQLKRRRYTGWGRLSRKLINGIRDKQSGKTILDFLKSDGFANRNFMQLIHDDSLTFKEDIQKAQVSGQGDSLHEHIANLAGSPAIKKGILQTVKVVDELVKVMGRHKPENIVIEMARENQTTQKGQKNSRERMKRIEEGIKELGSQILKEHPVENTQLQNEKLYLYYLQNGRDMYVDQELDINRLSDYDVDHIVPQSFLKDDSIDNKVLTRSDKNRGKSDNVPSEEVVKKMKNYWRQLLNAKLITQRKFDNLTKAERGGLSELDKAGFIKRQLVETRQITKHVAQILDSRMNTKYDENDKLIREVKVITLKSKLVSDFRKDFQFYKVREINNYHHAHDAYLNAVVGTALIKKYPKLESEFVYGDYKVYDVRKMIAKSEQEIGKATAKYFFYSNIMNFFKTEITLANGEIRKRPLIETNGETGEIVWDKGRDFATVRKVLSMPQVNIVKKTEVQTGGFSKESILPKRNSDKLIARKKDWDPKKYGGFDSPTVAYSVLVVAKVEKGKSKKLKSVKELLGITIMERSSFEKNPIDFLEAKGYKEVKKDLIIKLPKYSLFELENGRKRMLASAGELQKGNELALPSKYVNFLYLASHYEKLKGSPEDNEQKQLFVEQHKHYLDEIIEQISEFSKRVILADANLDKVLSAYNKHRDKPIREQAENIIHLFTLTNLGAPAAFKYFDTTIDRKRYTSTKEVLDATLIHQSITGLYETRIDLSQLGGDAPAPAPAPAMVSKGEELFTGVVPILVELDGDVNGHKFSVSGEGEGDATYGKLTLKFICTTGKLPVPWPTLVTTLTYGVQCFSRYPDHMKQHDFFKSAMPEGYVQERTIFFKDDGNYKTRAEVKFEGDTLVNRIELKGIDFKEDGNILGHKLEYNYNSHNVYIMADKQKNGIKVNFKIRHNIEDGSVQLADHYQQNTPIGDGPVLLPDNHYLSTQSALSKDPNEKRDHMVLLEFVTAAGITLGMDELYK

SEQ ID NO: 47 - protein, 1618 aa, synthetic construct
  REGION 1..1618: note = SYNTHETIC
MDKKYSIGLDIGTNSVGWAVITDEYKVPSKKFKVLGNTDRHSIKKNLIGALLFDSGETAEATRLKRTARRRYTRRKNRICYLQEIFSNEMAKVDDSFFHRLEESFLVEEDKKHERHPIFGNIVDEVAYHEKYPTIYHLRKKLVDSTDKADLRLIYLALAHMIKFRGHFLIEGDLNPDNSDVDKLFIQLVQTYNQLFEENPINASGVDAKAILSARLSKSRRLENLIAQLPGEKKNGLFGNLIALSLGLTPNFKSNFDLAEDAKLQLSKDTYDDDLDNLLAQIGDQYADLFLAAKNLSDAILLSDILRVNTEITKAPLSASMIKRYDEHHQDLTLLKALVRQQLPEKYKEIFFDQSKNGYAGYIDGGASQEEFYKFIKPILEKMDGTEELLVKLNREDLLRKQRTFDNGSIPHQIHLGELHAILRRQEDFYPFLKDNREKIEKILTFRIPYYVGPLARGNSRFAWMTRKSEETITPWNFEEVVDKGASAQSFIERMTNFDKNLPNEKVLPKHSLLYEYFTVYNELTKVKYVTEGMRKPAFLSGEQKKAIVDLLFKTNRKVTVKQLKEDYFKKIECFDSVEISGVEDRFNASLGTYHDLLKIIKDKDFLDNEENEDILEDIVLTLTLFEDREMIEERLKTYAHLFDDKVMKQLKRRRYTGWGRLSRKLINGIRDKQSGKTILDFLKSDGFANRNFMQLIHDDSLTFKEDIQKAQVSGQGDSLHEHIANLAGSPAIKKGILQTVKVVDELVKVMGRHKPENIVIEMARENQTTQKGQKNSRERMKRIEEGIKELGSQILKEHPVENTQLQNEKLYLYYLQNGRDMYVDQELDINRLSDYDVDHIVPQSFLKDDSIDNKVLTRSDKNRGKSDNVPSEEVVKKMKNYWRQLLNAKLITQRKFDNLTKAERGGLSELDKAGFIKRQLVETRQITKHVAQILDSRMNTKYDENDKLIREVKVITLKSKLVSDFRKDFQFYKVREINNYHHAHDAYLNAVVGTALIKKYPKLESEFVYGDYKVYDVRKMIAKSEQEIGKATAKYFFYSNIMNFFKTEITLANGEIRKRPLIETNGETGEIVWDKGRDFATVRKVLSMPQVNIVKKTEVQTGGFSKESILPKRNSDKLIARKKDWDPKKYGGFDSPTVAYSVLVVAKVEKGKSKKLKSVKELLGITIMERSSFEKNPIDFLEAKGYKEVKKDLIIKLPKYSLFELENGRKRMLASAGELQKGNELALPSKYVNFLYLASHYEKLKGSPEDNEQKQLFVEQHKHYLDEIIEQISEFSKRVILADANLDKVLSAYNKHRDKPIREQAENIIHLFTLTNLGAPAAFKYFDTTIDRKRYTSTKEVLDATLIHQSITGLYETRIDLSQLGGDAPAPAPAPAPAMVSKGEELFTGVVPILVELDGDVNGHKFSVSGEGEGDATYGKLTLKFICTTGKLPVPWPTLVTTLTYGVQCFSRYPDHMKQHDFFKSAMPEGYVQERTIFFKDDGNYKTRAEVKFEGDTLVNRIELKGIDFKEDGNILGHKLEYNYNSHNVYIMADKQKNGIKVNFKIRHNIEDGSVQLADHYQQNTPIGDGPVLLPDNHYLSTQSALSKDPNEKRDHMVLLEFVTAAGITLGMDELYK

SEQ ID NO: 48 - protein, 1620 aa, synthetic construct
  REGION 1..1620: note = SYNTHETIC
MDKKYSIGLDIGTNSVGWAVITDEYKVPSKKFKVLGNTDRHSIKKNLIGALLFDSGETAEATRLKRTARRRYTRRKNRICYLQEIFSNEMAKVDDSFFHRLEESFLVEEDKKHERHPIFGNIVDEVAYHEKYPTIYHLRKKLVDSTDKADLRLIYLALAHMIKFRGHFLIEGDLNPDNSDVDKLFIQLVQTYNQLFEENPINASGVDAKAILSARLSKSRRLENLIAQLPGEKKNGLFGNLIALSLGLTPNFKSNFDLAEDAKLQLSKDTYDDDLDNLLAQIGDQYADLFLAAKNLSDAILLSDILRVNTEITKAPLSASMIKRYDEHHQDLTLLKALVRQQLPEKYKEIFFDQSKNGYAGYIDGGASQEEFYKFIKPILEKMDGTEELLVKLNREDLLRKQRTFDNGSIPHQIHLGELHAILRRQEDFYPFLKDNREKIEKILTFRIPYYVGPLARGNSRFAWMTRKSEETITPWNFEEVVDKGASAQSFIERMTNFDKNLPNEKVLPKHSLLYEYFTVYNELTKVKYVTEGMRKPAFLSGEQKKAIVDLLFKTNRKVTVKQLKEDYFKKIECFDSVEISGVEDRFNASLGTYHDLLKIIKDKDFLDNEENEDILEDIVLTLTLFEDREMIEERLKTYAHLFDDKVMKQLKRRRYTGWGRLSRKLINGIRDKQSGKTILDFLKSDGFANRNFMQLIHDDSLTFKEDIQKAQVSGQGDSLHEHIANLAGSPAIKKGILQTVKVVDELVKVMGRHKPENIVIEMARENQTTQKGQKNSRERMKRIEEGIKELGSQILKEHPVENTQLQNEKLYLYYLQNGRDMYVDQELDINRLSDYDVDHIVPQSFLKDDSIDNKVLTRSDKNRGKSDNVPSEEVVKKMKNYWRQLLNAKLITQRKFDNLTKAERGGLSELDKAGFIKRQLVETRQITKHVAQILDSRMNTKYDENDKLIREVKVITLKSKLVSDFRKDFQFYKVREINNYHHAHDAYLNAVVGTALIKKYPKLESEFVYGDYKVYDVRKMIAKSEQEIGKATAKYFFYSNIMNFFKTEITLANGEIRKRPLIETNGETGEIVWDKGRDFATVRKVLSMPQVNIVKKTEVQTGGFSKESILPKRNSDKLIARKKDWDPKKYGGFDSPTVAYSVLVVAKVEKGKSKKLKSVKELLGITIMERSSFEKNPIDFLEAKGYKEVKKDLIIKLPKYSLFELENGRKRMLASAGELQKGNELALPSKYVNFLYLASHYEKLKGSPEDNEQKQLFVEQHKHYLDEIIEQISEFSKRVILADANLDKVLSAYNKHRDKPIREQAENIIHLFTLTNLGAPAAFKYFDTTIDRKRYTSTKEVLDATLIHQSITGLYETRIDLSQLGGDAPAPAPAPAPAPAMVSKGEELFTGVVPILVELDGDVNGHKFSVSGEGEGDATYGKLTLKFICTTGKLPVPWPTLVTTLTYGVQCFSRYPDHMKQHDFFKSAMPEGYVQERTIFFKDDGNYKTRAEVKFEGDTLVNRIELKGIDFKEDGNILGHKLEYNYNSHNVYIMADKQKNGIKVNFKIRHNIEDGSVQLADHYQQNTPIGDGPVLLPDNHYLSTQSALSKDPNEKRDHMVLLEFVTAAGITLGMDELYK

SEQ ID NO: 49 - protein, 1622 aa, synthetic construct
  REGION 1..1622: note = SYNTHETIC
MDKKYSIGLDIGTNSVGWAVITDEYKVPSKKFKVLGNTDRHSIKKNLIGALLFDSGETAEATRLKRTARRRYTRRKNRICYLQEIFSNEMAKVDDSFFHRLEESFLVEEDKKHERHPIFGNIVDEVAYHEKYPTIYHLRKKLVDSTDKADLRLIYLALAHMIKFRGHFLIEGDLNPDNSDVDKLFIQLVQTYNQLFEENPINASGVDAKAILSARLSKSRRLENLIAQLPGEKKNGLFGNLIALSLGLTPNFKSNFDLAEDAKLQLSKDTYDDDLDNLLAQIGDQYADLFLAAKNLSDAILLSDILRVNTEITKAPLSASMIKRYDEHHQDLTLLKALVRQQLPEKYKEIFFDQSKNGYAGYIDGGASQEEFYKFIKPILEKMDGTEELLVKLNREDLLRKQRTFDNGSIPHQIHLGELHAILRRQEDFYPFLKDNREKIEKILTFRIPYYVGPLARGNSRFAWMTRKSEETITPWNFEEVVDKGASAQSFIERMTNFDKNLPNEKVLPKHSLLYEYFTVYNELTKVKYVTEGMRKPAFLSGEQKKAIVDLLFKTNRKVTVKQLKEDYFKKIECFDSVEISGVEDRFNASLGTYHDLLKIIKDKDFLDNEENEDILEDIVLTLTLFEDREMIEERLKTYAHLFDDKVMKQLKRRRYTGWGRLSRKLINGIRDKQSGKTILDFLKSDGFANRNFMQLIHDDSLTFKEDIQKAQVSGQGDSLHEHIANLAGSPAIKKGILQTVKVVDELVKVMGRHKPENIVIEMARENQTTQKGQKNSRERMKRIEEGIKELGSQILKEHPVENTQLQNEKLYLYYLQNGRDMYVDQELDINRLSDYDVDHIVPQSFLKDDSIDNKVLTRSDKNRGKSDNVPSEEVVKKMKNYWRQLLNAKLITQRKFDNLTKAERGGLSELDKAGFIKRQLVETRQITKHVAQILDSRMNTKYDENDKLIREVKVITLKSKLVSDFRKDFQFYKVREINNYHHAHDAYLNAVVGTALIKKYPKLESEFVYGDYKVYDVRKMIAKSEQEIGKATAKYFFYSNIMNFFKTEITLANGEIRKRPLIETNGETGEIVWDKGRDFATVRKVLSMPQVNIVKKTEVQTGGFSKESILPKRNSDKLIARKKDWDPKKYGGFDSPTVAYSVLVVAKVEKGKSKKLKSVKELLGITIMERSSFEKNPIDFLEAKGYKEVKKDLIIKLPKYSLFELENGRKRMLASAGELQKGNELALPSKYVNFLYLASHYEKLKGSPEDNEQKQLFVEQHKHYLDEIIEQISEFSKRVILADANLDKVLSAYNKHRDKPIREQAENIIHLFTLTNLGAPAAFKYFDTTIDRKRYTSTKEVLDATLIHQSITGLYETRIDLSQLGGDAPAPAPAPAPAPAPAMVSKGEELFTGVVPILVELDGDVNGHKFSVSGEGEGDATYGKLTLKFICTTGKLPVPWPTLVTTLTYGVQCFSRYPDHMKQHDFFKSAMPEGYVQERTIFFKDDGNYKTRAEVKFEGDTLVNRIELKGIDFKEDGNILGHKLEYNYNSHNVYIMADKQKNGIKVNFKIRHNIEDGSVQLADHYQQNTPIGDGPVLLPDNHYLSTQSALSKDPNEKRDHMVLLEFVTAAGITLGMDELYK

SEQ ID NO: 50 - protein, 1624 aa, synthetic construct
  REGION 1..1624: note = SYNTHETIC
MDKKYSIGLDIGTNSVGWAVITDEYKVPSKKFKVLGNTDRHSIKKNLIGALLFDSGETAEATRLKRTARRRYTRRKNRICYLQEIFSNEMAKVDDSFFHRLEESFLVEEDKKHERHPIFGNIVDEVAYHEKYPTIYHLRKKLVDSTDKADLRLIYLALAHMIKFRGHFLIEGDLNPDNSDVDKLFIQLVQTYNQLFEENPINASGVDAKAILSARLSKSRRLENLIAQLPGEKKNGLFGNLIALSLGLTPNFKSNFDLAEDAKLQLSKDTYDDDLDNLLAQIGDQYADLFLAAKNLSDAILLSDILRVNTEITKAPLSASMIKRYDEHHQDLTLLKALVRQQLPEKYKEIFFDQSKNGYAGYIDGGASQEEFYKFIKPILEKMDGTEELLVKLNREDLLRKQRTFDNGSIPHQIHLGELHAILRRQEDFYPFLKDNREKIEKILTFRIPYYVGPLARGNSRFAWMTRKSEETITPWNFEEVVDKGASAQSFIERMTNFDKNLPNEKVLPKHSLLYEYFTVYNELTKVKYVTEGMRKPAFLSGEQKKAIVDLLFKTNRKVTVKQLKEDYFKKIECFDSVEISGVEDRFNASLGTYHDLLKIIKDKDFLDNEENEDILEDIVLTLTLFEDREMIEERLKTYAHLFDDKVMKQLKRRRYTGWGRLSRKLINGIRDKQSGKTILDFLKSDGFANRNFMQLIHDDSLTFKEDIQKAQVSGQGDSLHEHIANLAGSPAIKKGILQTVKVVDELVKVMGRHKPENIVIEMARENQTTQKGQKNSRERMKRIEEGIKELGSQILKEHPVENTQLQNEKLYLYYLQNGRDMYVDQELDINRLSDYDVDHIVPQSFLKDDSIDNKVLTRSDKNRGKSDNVPSEEVVKKMKNYWRQLLNAKLITQRKFDNLTKAERGGLSELDKAGFIKRQLVETRQITKHVAQILDSRMNTKYDENDKLIREVKVITLKSKLVSDFRKDFQFYKVREINNYHHAHDAYLNAVVGTALIKKYPKLESEFVYGDYKVYDVRKMIAKSEQEIGKATAKYFFYSNIMNFFKTEITLANGEIRKRPLIETNGETGEIVWDKGRDFATVRKVLSMPQVNIVKKTEVQTGGFSKESILPKRNSDKLIARKKDWDPKKYGGFDSPTVAYSVLVVAKVEKGKSKKLKSVKELLGITIMERSSFEKNPIDFLEAKGYKEVKKDLIIKLPKYSLFELENGRKRMLASAGELQKGNELALPSKYVNFLYLASHYEKLKGSPEDNEQKQLFVEQHKHYLDEIIEQISEFSKRVILADANLDKVLSAYNKHRDKPIREQAENIIHLFTLTNLGAPAAFKYFDTTIDRKRYTSTKEVLDATLIHQSITGLYETRIDLSQLGGDAPAPAPAPAPAPAPAPAMVSKGEELFTGVVPILVELDGDVNGHKFSVSGEGEGDATYGKLTLKFICTTGKLPVPWPTLVTTLTYGVQCFSRYPDHMKQHDFFKSAMPEGYVQERTIFFKDDGNYKTRAEVKFEGDTLVNRIELKGIDFKEDGNILGHKLEYNYNSHNVYIMADKQKNGIKVNFKIRHNIEDGSVQLADHYQQNTPIGDGPVLLPDNHYLSTQSALSKDPNEKRDHMVLLEFVTAAGITLGMDELYK

SEQ ID NO: 51 - protein, 1626 aa, synthetic construct
  REGION 1..1626: note = SYNTHETIC
MDKKYSIGLDIGTNSVGWAVITDEYKVPSKKFKVLGNTDRHSIKKNLIGALLFDSGETAEATRLKRTARRRYTRRKNRICYLQEIFSNEMAKVDDSFFHRLEESFLVEEDKKHERHPIFGNIVDEVAYHEKYPTIYHLRKKLVDSTDKADLRLIYLALAHMIKFRGHFLIEGDLNPDNSDVDKLFIQLVQTYNQLFEENPINASGVDAKAILSARLSKSRRLENLIAQLPGEKKNGLFGNLIALSLGLTPNFKSNFDLAEDAKLQLSKDTYDDDLDNLLAQIGDQYADLFLAAKNLSDAILLSDILRVNTEITKAPLSASMIKRYDEHHQDLTLLKALVRQQLPEKYKEIFFDQSKNGYAGYIDGGASQEEFYKFIKPILEKMDGTEELLVKLNREDLLRKQRTFDNGSIPHQIHLGELHAILRRQEDFYPFLKDNREKIEKILTFRIPYYVGPLARGNSRFAWMTRKSEETITPWNFEEVVDKGASAQSFIERMTNFDKNLPNEKVLPKHSLLYEYFTVYNELTKVKYVTEGMRKPAFLSGEQKKAIVDLLFKTNRKVTVKQLKEDYFKKIECFDSVEISGVEDRFNASLGTYHDLLKIIKDKDFLDNEENEDILEDIVLTLTLFEDREMIEERLKTYAHLFDDKVMKQLKRRRYTGWGRLSRKLINGIRDKQSGKTILDFLKSDGFANRNFMQLIHDDSLTFKEDIQKAQVSGQGDSLHEHIANLAGSPAIKKGILQTVKVVDELVKVMGRHKPENIVIEMARENQTTQKGQKNSRERMKRIEEGIKELGSQILKEHPVENTQLQNEKLYLYYLQNGRDMYVDQELDINRLSDYDVDHIVPQSFLKDDSIDNKVLTRSDKNRGKSDNVPSEEVVKKMKNYWRQLLNAKLITQRKFDNLTKAERGGLSELDKAGFIKRQLVETRQITKHVAQILDSRMNTKYDENDKLIREVKVITLKSKLVSDFRKDFQFYKVREINNYHHAHDAYLNAVVGTALIKKYPKLESEFVYGDYKVYDVRKMIAKSEQEIGKATAKYFFYSNIMNFFKTEITLANGEIRKRPLIETNGETGEIVWDKGRDFATVRKVLSMPQVNIVKKTEVQTGGFSKESILPKRNSDKLIARKKDWDPKKYGGFDSPTVAYSVLVVAKVEKGKSKKLKSVKELLGITIMERSSFEKNPIDFLEAKGYKEVKKDLIIKLPKYSLFELENGRKRMLASAGELQKGNELALPSKYVNFLYLASHYEKLKGSPEDNEQKQLFVEQHKHYLDEIIEQISEFSKRVILADANLDKVLSAYNKHRDKPIREQAENIIHLFTLTNLGAPAAFKYFDTTIDRKRYTSTKEVLDATLIHQSITGLYETRIDLSQLGGDAPAPAPAPAPAPAPAPAPAMVSKGEELFTGVVPILVELDGDVNGHKFSVSGEGEGDATYGKLTLKFICTTGKLPVPWPTLVTTLTYGVQCFSRYPDHMKQHDFFKSAMPEGYVQERTIFFKDDGNYKTRAEVKFEGDTLVNRIELKGIDFKEDGNILGHKLEYNYNSHNVYIMADKQKNGIKVNFKIRHNIEDGSVQLADHYQQNTPIGDGPVLLPDNHYLSTQSALSKDPNEKRDHMVLLEFVTAAGITLGMDELYK

SEQ ID NO: 52 - protein, 1628 aa, synthetic construct
  REGION 1..1628: note = SYNTHETIC
MDKKYSIGLDIGTNSVGWAVITDEYKVPSKKFKVLGNTDRHSIKKNLIGALLFDSGETAEATRLKRTARRRYTRRKNRICYLQEIFSNEMAKVDDSFFHRLEESFLVEEDKKHERHPIFGNIVDEVAYHEKYPTIYHLRKKLVDSTDKADLRLIYLALAHMIKFRGHFLIEGDLNPDNSDVDKLFIQLVQTYNQLFEENPINASGVDAKAILSARLSKSRRLENLIAQLPGEKKNGLFGNLIALSLGLTPNFKSNFDLAEDAKLQLSKDTYDDDLDNLLAQIGDQYADLFLAAKNLSDAILLSDILRVNTEITKAPLSASMIKRYDEHHQDLTLLKALVRQQLPEKYKEIFFDQSKNGYAGYIDGGASQEEFYKFIKPILEKMDGTEELLVKLNREDLLRKQRTFDNGSIPHQIHLGELHAILRRQEDFYPFLKDNREKIEKILTFRIPYYVGPLARGNSRFAWMTRKSEETITPWNFEEVVDKGASAQSFIERMTNFDKNLPNEKVLPKHSLLYEYFTVYNELTKVKYVTEGMRKPAFLSGEQKKAIVDLLFKTNRKVTVKQLKEDYFKKIECFDSVEISGVEDRFNASLGTYHDLLKIIKDKDFLDNEENEDILEDIVLTLTLFEDREMIEERLKTYAHLFDDKVMKQLKRRRYTGWGRLSRKLINGIRDKQSGKTILDFLKSDGFANRNFMQLIHDDSLTFKEDIQKAQVSGQGDSLHEHIANLAGSPAIKKGILQTVKVVDELVKVMGRHKPENIVIEMARENQTTQKGQKNSRERMKRIEEGIKELGSQILKEHPVENTQLQNEKLYLYYLQNGRDMYVDQELDINRLSDYDVDHIVPQSFLKDDSIDNKVLTRSDKNRGKSDNVPSEEVVKKMKNYWRQLLNAKLITQRKFDNLTKAERGGLSELDKAGFIKRQLVETRQITKHVAQILDSRMNTKYDENDKLIREVKVITLKSKLVSDFRKDFQFYKVREINNYHHAHDAYLNAVVGTALIKKYPKLESEFVYGDYKVYDVRKMIAKSEQEIGKATAKYFFYSNIMNFFKTEITLANGEIRKRPLIETNGETGEIVWDKGRDFATVRKVLSMPQVNIVKKTEVQTGGFSKESILPKRNSDKLIARKKDWDPKKYGGFDSPTVAYSVLVVAKVEKGKSKKLKSVKELLGITIMERSSFEKNPIDFLEAKGYKEVKKDLIIKLPKYSLFELENGRKRMLASAGELQKGNELALPSKYVNFLYLASHYEKLKGSPEDNEQKQLFVEQHKHYLDEIIEQISEFSKRVILADANLDKVLSAYNKHRDKPIREQAENIIHLFTLTNLGAPAAFKYFDTTIDRKRYTSTKEVLDATLIHQSITGLYETRIDLSQLGGDAPAPAPAPAPAPAPAPAPAPAMVSKGEELFTGVVPILVELDGDVNGHKFSVSGEGEGDATYGKLTLKFICTTGKLPVPWPTLVTTLTYGVQCFSRYPDHMKQHDFFKSAMPEGYVQERTIFFKDDGNYKTRAEVKFEGDTLVNRIELKGIDFKEDGNILGHKLEYNYNSHNVYIMADKQKNGIKVNFKIRHNIEDGSVQLADHYQQNTPIGDGPVLLPDNHYLSTQSALSKDPNEKRDHMVLLEFVTAAGITLGMDELYK

SEQ ID NO: 53 - protein, 1630 aa, synthetic construct
  REGION 1..1630: note = SYNTHETIC
MDKKYSIGLDIGTNSVGWAVITDEYKVPSKKFKVLGNTDRHSIKKNLIGALLFDSGETAEATRLKRTARRRYTRRKNRICYLQEIFSNEMAKVDDSFFHRLEESFLVEEDKKHERHPIFGNIVDEVAYHEKYPTIYHLRKKLVDSTDKADLRLIYLALAHMIKFRGHFLIEGDLNPDNSDVDKLFIQLVQTYNQLFEENPINASGVDAKAILSARLSKSRRLENLIAQLPGEKKNGLFGNLIALSLGLTPNFKSNFDLAEDAKLQLSKDTYDDDLDNLLAQIGDQYADLFLAAKNLSDAILLSDILRVNTEITKAPLSASMIKRYDEHHQDLTLLKALVRQQLPEKYKEIFFDQSKNGYAGYIDGGASQEEFYKFIKPILEKMDGTEELLVKLNREDLLRKQRTFDNGSIPHQIHLGELHAILRRQEDFYPFLKDNREKIEKILTFRIPYYVGPLARGNSRFAWMTRKSEETITPWNFEEVVDKGASAQSFIERMTNFDKNLPNEKVLPKHSLLYEYFTVYNELTKVKYVTEGMRKPAFLSGEQKKAIVDLLFKTNRKVTVKQLKEDYFKKIECFDSVEISGVEDRFNASLGTYHDLLKIIKDKDFLDNEENEDILEDIVLTLTLFEDREMIEERLKTYAHLFDDKVMKQLKRRRYTGWGRLSRKLINGIRDKQSGKTILDFLKSDGFANRNFMQLIHDDSLTFKEDIQKAQVSGQGDSLHEHIANLAGSPAIKKGILQTVKVVDELVKVMGRHKPENIVIEMARENQTTQKGQKNSRERMKRIEEGIKELGSQILKEHPVENTQLQNEKLYLYYLQNGRDMYVDQELDINRLSDYDVDHIVPQSFLKDDSIDNKVLTRSDKNRGKSDNVPSEEVVKKMKNYWRQLLNAKLITQRKFDNLTKAERGGLSELDKAGFIKRQLVETRQITKHVAQILDSRMNTKYDENDKLIREVKVITLKSKLVSDFRKDFQFYKVREINNYHHAHDAYLNAVVGTALIKKYPKLESEFVYGDYKVYDVRKMIAKSEQEIGKATAKYFFYSNIMNFFKTEITLANGEIRKRPLIETNGETGEIVWDKGRDFATVRKVLSMPQVNIVKKTEVQTGGFSKESILPKRNSDKLIARKKDWDPKKYGGFDSPTVAYSVLVVAKVEKGKSKKLKSVKELLGITIMERSSFEKNPIDFLEAKGYKEVKKDLIIKLPKYSLFELENGRKRMLASAGELQKGNELALPSKYVNFLYLASHYEKLKGSPEDNEQKQLFVEQHKHYLDEIIEQISEFSKRVILADANLDKVLSAYNKHRDKPIREQAENIIHLFTLTNLGAPAAFKYFDTTIDRKRYTSTKEVLDATLIHQSITGLYETRIDLSQLGGDAPAPAPAPAPAPAPAPAPAPAPAMVSKGEELFTGVVPILVELDGDVNGHKFSVSGEGEGDATYGKLTLKFICTTGKLPVPWPTLVTTLTYGVQCFSRYPDHMKQHDFFKSAMPEGYVQERTIFFKDDGNYKTRAEVKFEGDTLVNRIELKGIDFKEDGNILGHKLEYNYNSHNVYIMADKQKNGIKVNFKIRHNIEDGSVQLADHYQQNTPIGDGPVLLPDNHYLSTQSALSKDPNEKRDHMVLLEFVTAAGITLGMDELYK

SEQ ID NO: 54 - protein, 1632 aa, synthetic construct
  REGION 1..1632: note = SYNTHETIC
MDKKYSIGLDIGTNSVGWAVITDEYKVPSKKFKVLGNTDRHSIKKNLIGALLFDSGETAEATRLKRTARRRYTRRKNRICYLQEIFSNEMAKVDDSFFHRLEESFLVEEDKKHERHPIFGNIVDEVAYHEKYPTIYHLRKKLVDSTDKADLRLIYLALAHMIKFRGHFLIEGDLNPDNSDVDKLFIQLVQTYNQLFEENPINASGVDAKAILSARLSKSRRLENLIAQLPGEKKNGLFGNLIALSLGLTPNFKSNFDLAEDAKLQLSKDTYDDDLDNLLAQIGDQYADLFLAAKNLSDAILLSDILRVNTEITKAPLSASMIKRYDEHHQDLTLLKALVRQQLPEKYKEIFFDQSKNGYAGYIDGGASQEEFYKFIKPILEKMDGTEELLVKLNREDLLRKQRTFDNGSIPHQIHLGELHAILRRQEDFYPFLKDNREKIEKILTFRIPYYVGPLARGNSRFAWMTRKSEETITPWNFEEVVDKGASAQSFIERMTNFDKNLPNEKVLPKHSLLYEYFTVYNELTKVKYVTEGMRKPAFLSGEQKKAIVDLLFKTNRKVTVKQLKEDYFKKIECFDSVEISGVEDRFNASLGTYHDLLKIIKDKDFLDNEENEDILEDIVLTLTLFEDREMIEERLKTYAHLFDDKVMKQLKRRRYTGWGRLSRKLINGIRDKQSGKTILDFLKSDGFANRNFMQLIHDDSLTFKEDIQKAQVSGQGDSLHEHIANLAGSPAIKKGILQTVKVVDELVKVMGRHKPENIVIEMARENQTTQKGQKNSRERMKRIEEGIKELGSQILKEHPVENTQLQNEKLYLYYLQNGRDMYVDQELDINRLSDYDVDHIVPQSFLKDDSIDNKVLTRSDKNRGKSDNVPSEEVVKKMKNYWRQLLNAKLITQRKFDNLTKAERGGLSELDKAGFIKRQLVETRQITKHVAQILDSRMNTKYDENDKLIREVKVITLKSKLVSDFRKDFQFYKVREINNYHHAHDAYLNAVVGTALIKKYPKLESEFVYGDYKVYDVRKMIAKSEQEIGKATAKYFFYSNIMNFFKTEITLANGEIRKRPLIETNGETGEIVWDKGRDFATVRKVLSMPQVNIVKKTEVQTGGFSKESILPKRNSDKLIARKKDWDPKKYGGFDSPTVAYSVLVVAKVEKGKSKKLKSVKELLGITIMERSSFEKNPIDFLEAKGYKEVKKDLIIKLPKYSLFELENGRKRMLASAGELQKGNELALPSKYVNFLYLASHYEKLKGSPEDNEQKQLFVEQHKHYLDEIIEQISEFSKRVILADANLDKVLSAYNKHRDKPIREQAENIIHLFTLTNLGAPAAFKYFDTTIDRKRYTSTKEVLDATLIHQSITGLYETRIDLSQLGGDAPAPAPAPAPAPAPAPAPAPAPAPAMVSKGEELFTGVVPILVELDGDVNGHKFSVSGEGEGDATYGKLTLKFICTTGKLPVPWPTLVTTLTYGVQCFSRYPDHMKQHDFFKSAMPEGYVQERTIFFKDDGNYKTRAEVKFEGDTLVNRIELKGIDFKEDGNILGHKLEYNYNSHNVYIMADKQKNGIKVNFKIRHNIEDGSVQLADHYQQNTPIGDGPVLLPDNHYLSTQSALSKDPNEKRDHMVLLEFVTAAGITLGMDELYK

SEQ ID NO: 55 - protein, 1634 aa, synthetic construct
  REGION 1..1634: note = SYNTHETIC
MDKKYSIGLDIGTNSVGWAVITDEYKVPSKKFKVLGNTDRHSIKKNLIGALLFDSGETAEATRLKRTARRRYTRRKNRICYLQEIFSNEMAKVDDSFFHRLEESFLVEEDKKHERHPIFGNIVDEVAYHEKYPTIYHLRKKLVDSTDKADLRLIYLALAHMIKFRGHFLIEGDLNPDNSDVDKLFIQLVQTYNQLFEENPINASGVDAKAILSARLSKSRRLENLIAQLPGEKKNGLFGNLIALSLGLTPNFKSNFDLAEDAKLQLSKDTYDDDLDNLLAQIGDQYADLFLAAKNLSDAILLSDILRVNTEITKAPLSASMIKRYDEHHQDLTLLKALVRQQLPEKYKEIFFDQSKNGYAGYIDGGASQEEFYKFIKPILEKMDGTEELLVKLNREDLLRKQRTFDNGSIPHQIHLGELHAILRRQEDFYPFLKDNREKIEKILTFRIPYYVGPLARGNSRFAWMTRKSEETITPWNFEEVVDKGASAQSFIERMTNFDKNLPNEKVLPKHSLLYEYFTVYNELTKVKYVTEGMRKPAFLSGEQKKAIVDLLFKTNRKVTVKQLKEDYFKKIECFDSVEISGVEDRFNASLGTYHDLLKIIKDKDFLDNEENEDILEDIVLTLTLFEDREMIEERLKTYAHLFDDKVMKQLKRRRYTGWGRLSRKLINGIRDKQSGKTILDFLKSDGFANRNFMQLIHDDSLTFKEDIQKAQVSGQGDSLHEHIANLAGSPAIKKGILQTVKVVDELVKVMGRHKPENIVIEMARENQTTQKGQKNSRERMKRIEEGIKELGSQILKEHPVENTQLQNEKLYLYYLQNGRDMYVDQELDINRLSDYDVDHIVPQSFLKDDSIDNKVLTRSDKNRGKSDNVPSEEVVKKMKNYWRQLLNAKLITQRKFDNLTKAERGGLSELDKAGFIKRQLVETRQITKHVAQILDSRMNTKYDENDKLIREVKVITLKSKLVSDFRKDFQFYKVREINNYHHAHDAYLNAVVGTALIKKYPKLESEFVYGDYKVYDVRKMIAKSEQEIGKATAKYFFYSNIMNFFKTEITLANGEIRKRPLIETNGETGEIVWDKGRDFATVRKVLSMPQVNIVKKTEVQTGGFSKESILPKRNSDKLIARKKDWDPKKYGGFDSPTVAYSVLVVAKVEKGKSKKLKSVKELLGITIMERSSFEKNPIDFLEAKGYKEVKKDLIIKLPKYSLFELENGRKRMLASAGELQKGNELALPSKYVNFLYLASHYEKLKGSPEDNEQKQLFVEQHKHYLDEIIEQISEFSKRVILADANLDKVLSAYNKHRDKPIREQAENIIHLFTLTNLGAPAAFKYFDTTIDRKRYTSTKEVLDATLIHQSITGLYETRIDLSQLGGDAPAPAPAPAPAPAPAPAPAPAPAPAPAMVSKGEELFTGVVPILVELDGDVNGHKFSVSGEGEGDATYGKLTLKFICTTGKLPVPWPTLVTTLTYGVQCFSRYPDHMKQHDFFKSAMPEGYVQERTIFFKDDGNYKTRAEVKFEGDTLVNRIELKGIDFKEDGNILGHKLEYNYNSHNVYIMADKQKNGIKVNFKIRHNIEDGSVQLADHYQQNTPIGDGPVLLPDNHYLSTQSALSKDPNEKRDHMVLLEFVTAAGITLGMDELYK

SEQ ID NO: 56 - protein, 1636 aa, synthetic construct
  REGION 1..1636: note = SYNTHETIC
MDKKYSIGLDIGTNSVGWAVITDEYKVPSKKFKVLGNTDRHSIKKNLIGALLFDSGETAEATRLKRTARRRYTRRKNRICYLQEIFSNEMAKVDDSFFHRLEESFLVEEDKKHERHPIFGNIVDEVAYHEKYPTIYHLRKKLVDSTDKADLRLIYLALAHMIKFRGHFLIEGDLNPDNSDVDKLFIQLVQTYNQLFEENPINASGVDAKAILSARLSKSRRLENLIAQLPGEKKNGLFGNLIALSLGLTPNFKSNFDLAEDAKLQLSKDTYDDDLDNLLAQIGDQYADLFLAAKNLSDAILLSDILRVNTEITKAPLSASMIKRYDEHHQDLTLLKALVRQQLPEKYKEIFFDQSKNGYAGYIDGGASQEEFYKFIKPILEKMDGTEELLVKLNREDLLRKQRTFDNGSIPHQIHLGELHAILRRQEDFYPFLKDNREKIEKILTFRIPYYVGPLARGNSRFAWMTRKSEETITPWNFEEVVDKGASAQSFIERMTNFDKNLPNEKVLPKHSLLYEYFTVYNELTKVKYVTEGMRKPAFLSGEQKKAIVDLLFKTNRKVTVKQLKEDYFKKIECFDSVEISGVEDRFNASLGTYHDLLKIIKDKDFLDNEENEDILEDIVLTLTLFEDREMIEERLKTYAHLFDDKVMKQLKRRRYTGWGRLSRKLINGIRDKQSGKTILDFLKSDGFANRNFMQLIHDDSLTFKEDIQKAQVSGQGDSLHEHIANLAGSPAIKKGILQTVKVVDELVKVMGRHKPENIVIEMARENQTTQKGQKNSRERMKRIEEGIKELGSQILKEHPVENTQLQNEKLYLYYLQNGRDMYVDQELDINRLSDYDVDHIVPQSFLKDDSIDNKVLTRSDKNRGKSDNVPSEEVVKKMKNYWRQLLNAKLITQRKFDNLTKAERGGLSELDKAGFIKRQLVETRQITKHVAQILDSRMNTKYDENDKLIREVKVITLKSKLVSDFRKDFQFYKVREINNYHHAHDAYLNAVVGTALIKKYPKLESEFVYGDYKVYDVRKMIAKSEQEIGKATAKYFFYSNIMNFFKTEITLANGEIRKRPLIETNGETGEIVWDKGRDFATVRKVLSMPQVNIVKKTEVQTGGFSKESILPKRNSDKLIARKKDWDPKKYGGFDSPTVAYSVLVVAKVEKGKSKKLKSVKELLGITIMERSSFEKNPIDFLEAKGYKEVKKDLIIKLPKYSLFELENGRKRMLASAGELQKGNELALPSKYVNFLYLASHYEKLKGSPEDNEQKQLFVEQHKHYLDEIIEQISEFSKRVILADANLDKVLSAYNKHRDKPIREQAENIIHLFTLTNLGAPAAFKYFDTTIDRKRYTSTKEVLDATLIHQSITGLYETRIDLSQLGGDAPAPAPAPAPAPAPAPAPAPAPAPAPAPAMVSKGEELFTGVVPILVELDGDVNGHKFSVSGEGEGDATYGKLTLKFICTTGKLPVPWPTLVTTLTYGVQCFSRYPDHMKQHDFFKSAMPEGYVQERTIFFKDDGNYKTRAEVKFEGDTLVNRIELKGIDFKEDGNILGHKLEYNYNSHNVYIMADKQKNGIKVNFKIRHNIEDGSVQLADHYQQNTPIGDGPVLLPDNHYLSTQSALSKDPNEKRDHMVLLEFVTAAGITLGMDELYK

SEQ ID NO: 57 - protein, 1609 aa, synthetic construct
  REGION 1..1609: note = SYNTHETIC
  VARIANT 1369: note = X can be any naturally occurring amino acid
MDKKYSIGLDIGTNSVGWAVITDEYKVPSKKFKVLGNTDRHSIKKNLIGALLFDSGETAEATRLKRTARRRYTRRKNRICYLQEIFSNEMAKVDDSFFHRLEESFLVEEDKKHERHPIFGNIVDEVAYHEKYPTIYHLRKKLVDSTDKADLRLIYLALAHMIKFRGHFLIEGDLNPDNSDVDKLFIQLVQTYNQLFEENPINASGVDAKAILSARLSKSRRLENLIAQLPGEKKNGLFGNLIALSLGLTPNFKSNFDLAEDAKLQLSKDTYDDDLDNLLAQIGDQYADLFLAAKNLSDAILLSDILRVNTEITKAPLSASMIKRYDEHHQDLTLLKALVRQQLPEKYKEIFFDQSKNGYAGYIDGGASQEEFYKFIKPILEKMDGTEELLVKLNREDLLRKQRTFDNGSIPHQIHLGELHAILRRQEDFYPFLKDNREKIEKILTFRIPYYVGPLARGNSRFAWMTRKSEETITPWNFEEVVDKGASAQSFIERMTNFDKNLPNEKVLPKHSLLYEYFTVYNELTKVKYVTEGMRKPAFLSGEQKKAIVDLLFKTNRKVTVKQLKEDYFKKIECFDSVEISGVEDRFNASLGTYHDLLKIIKDKDFLDNEENEDILEDIVLTLTLFEDREMIEERLKTYAHLFDDKVMKQLKRRRYTGWGRLSRKLINGIRDKQSGKTILDFLKSDGFANRNFMQLIHDDSLTFKEDIQKAQVSGQGDSLHEHIANLAGSPAIKKGILQTVKVVDELVKVMGRHKPENIVIEMARENQTTQKGQKNSRERMKRIEEGIKELGSQILKEHPVENTQLQNEKLYLYYLQNGRDMYVDQELDINRLSDYDVDHIVPQSFLKDDSIDNKVLTRSDKNRGKSDNVPSEEVVKKMKNYWRQLLNAKLITQRKFDNLTKAERGGLSELDKAGFIKRQLVETRQITKHVAQILDSRMNTKYDENDKLIREVKVITLKSKLVSDFRKDFQFYKVREINNYHHAHDAYLNAVVGTALIKKYPKLESEFVYGDYKVYDVRKMIAKSEQEIGKATAKYFFYSNIMNFFKTEITLANGEIRKRPLIETNGETGEIVWDKGRDFATVRKVLSMPQVNIVKKTEVQTGGFSKESILPKRNSDKLIARKKDWDPKKYGGFDSPTVAYSVLVVAKVEKGKSKKLKSVKELLGITIMERSSFEKNPIDFLEAKGYKEVKKDLIIKLPKYSLFELENGRKRMLASAGELQKGNELALPSKYVNFLYLASHYEKLKGSPEDNEQKQLFVEQHKHYLDEIIEQISEFSKRVILADANLDKVLSAYNKHRDKPIREQAENIIHLFTLTNLGAPAAFKYFDTTIDRKRYTSTKEVLDATLIHQSITGLYETRIDLSQLGGDXPMVSKGEELFTGVVPILVELDGDVNGHKFSVSGEGEGDATYGKLTLKFICTTGKLPVPWPTLVTTLTYGVQCFSRYPDHMKQHDFFKSAMPEGYVQERTIFFKDDGNYKTRAEVKFEGDTLVNRIELKGIDFKEDGNILGHKLEYNYNSHNVYIMADKQKNGIKVNFKIRHNIEDGSVQLADHYQQNTPIGDGPVLLPDNHYLSTQSALSKDPNEKRDHMVLLEFVTAAGITLGMDELYK

SEQ ID NO: 58 - protein, 1611 aa, synthetic construct
  REGION 1..1611: note = SYNTHETIC
  VARIANT 1369: note = X can be any naturally occurring amino acid
  VARIANT 1371: note = X can be any naturally occurring amino acid
MDKKYSIGLDIGTNSVGWAVITDEYKVPSKKFKVLGNTDRHSIKKNLIGALLFDSGETAEATRLKRTARRRYTRRKNRICYLQEIFSNEMAKVDDSFFHRLEESFLVEEDKKHERHPIFGNIVDEVAYHEKYPTIYHLRKKLVDSTDKADLRLIYLALAHMIKFRGHFLIEGDLNPDNSDVDKLFIQLVQTYNQLFEENPINASGVDAKAILSARLSKSRRLENLIAQLPGEKKNGLFGNLIALSLGLTPNFKSNFDLAEDAKLQLSKDTYDDDLDNLLAQIGDQYADLFLAAKNLSDAILLSDILRVNTEITKAPLSASMIKRYDEHHQDLTLLKALVRQQLPEKYKEIFFDQSKNGYAGYIDGGASQEEFYKFIKPILEKMDGTEELLVKLNREDLLRKQRTFDNGSIPHQIHLGELHAILRRQEDFYPFLKDNREKIEKILTFRIPYYVGPLARGNSRFAWMTRKSEETITPWNFEEVVDKGASAQSFIERMTNFDKNLPNEKVLPKHSLLYEYFTVYNELTKVKYVTEGMRKPAFLSGEQKKAIVDLLFKTNRKVTVKQLKEDYFKKIECFDSVEISGVEDRFNASLGTYHDLLKIIKDKDFLDNEENEDILEDIVLTLTLFEDREMIEERLKTYAHLFDDKVMKQLKRRRYTGWGRLSRKLINGIRDKQSGKTILDFLKSDGFANRNFMQLIHDDSLTFKEDIQKAQVSGQGDSLHEHIANLAGSPAIKKGILQTVKVVDELVKVMGRHKPENIVIEMARENQTTQKGQKNSRERMKRIEEGIKELGSQILKEHPVENTQLQNEKLYLYYLQNGRDMYVDQELDINRLSDYDVDHIVPQSFLKDDSIDNKVLTRSDKNRGKSDNVPSEEVVKKMKNYWRQLLNAKLITQRKFDNLTKAERGGLSELDKAGFIKRQLVETRQITKHVAQILDSRMNTKYDENDKLIREVKVITLKSKLVSDFRKDFQFYKVREINNYHHAHDAYLNAVVGTALIKKYPKLESEFVYGDYKVYDVRKMIAKSEQEIGKATAKYFFYSNIMNFFKTEITLANGEIRKRPLIETNGETGEIVWDKGRDFATVRKVLSMPQVNIVKKTEVQTGGFSKESILPKRNSDKLIARKKDWDPKKYGGFDSPTVAYSVLVVAKVEKGKSKKLKSVKELLGITIMERSSFEKNPIDFLEAKGYKEVKKDLIIKLPKYSLFELENGRKRMLASAGELQKGNELALPSKYVNFLYLASHYEKLKGSPEDNEQKQLFVEQHKHYLDEIIEQISEFSKRVILADANLDKVLSAYNKHRDKPIREQAENIIHLFTLTNLGAPAAFKYFDTTIDRKRYTSTKEVLDATLIHQSITGLYETRIDLSQLGGDXPXPMVSKGEELFTGVVPILVELDGDVNGHKFSVSGEGEGDATYGKLTLKFICTTGKLPVPWPTLVTTLTYGVQCFSRYPDHMKQHDFFKSAMPEGYVQERTIFFKDDGNYKTRAEVKFEGDTLVNRIELKGIDFKEDGNILGHKLEYNYNSHNVYIMADKQKNGIKVNFKIRHNIEDGSVQLADHYQQNTPIGDGPVLLPDNHYLSTQSALSKDPNEKRDHMVLLEFVTAAGITLGMDELYK

SEQ ID NO: 59 - protein, 1613 aa, synthetic construct
  REGION 1..1613: note = SYNTHETIC
  VARIANT 1369: note = X can be any naturally occurring amino acid
  VARIANT 1371: note = X can be any naturally occurring amino acid
  VARIANT 1373: note = X can be any naturally occurring amino acid
MDKKYSIGLDIGTNSVGWAVITDEYKVPSKKFKVLGNTDRHSIKKNLIGALLFDSGETAEATRLKRTARRRYTRRKNRICYLQEIFSNEMAKVDDSFFHRLEESFLVEEDKKHERHPIFGNIVDEVAYHEKYPTIYHLRKKLVDSTDKADLRLIYLALAHMIKFRGHFLIEGDLNPDNSDVDKLFIQLVQTYNQLFEENPINASGVDAKAILSARLSKSRRLENLIAQLPGEKKNGLFGNLIALSLGLTPNFKSNFDLAEDAKLQLSKDTYDDDLDNLLAQIGDQYADLFLAAKNLSDAILLSDILRVNTEITKAPLSASMIKRYDEHHQDLTLLKALVRQQLPEKYKEIFFDQSKNGYAGYIDGGASQEEFYKFIKPILEKMDGTEELLVKLNREDLLRKQRTFDNGSIPHQIHLGELHAILRRQEDFYPFLKDNREKIEKILTFRIPYYVGPLARGNSRFAWMTRKSEETITPWNFEEVVDKGASAQSFIERMTNFDKNLPNEKVLPKHSLLYEYFTVYNELTKVKYVTEGMRKPAFLSGEQKKAIVDLLFKTNRKVTVKQLKEDYFKKIECFDSVEISGVEDRFNASLGTYHDLLKIIKDKDFLDNEENEDILEDIVLTLTLFEDREMIEERLKTYAHLFDDKVMKQLKRRRYTGWGRLSRKLINGIRDKQSGKTILDFLKSDGFANRNFMQLIHDDSLTFKEDIQKAQVSGQGDSLHEHIANLAGSPAIKKGILQTVKVVDELVKVMGRHKPENIVIEMARENQTTQKGQKNSRERMKRIEEGIKELGSQILKEHPVENTQLQNEKLYLYYLQNGRDMYVDQELDINRLSDYDVDHIVPQSFLKDDSIDNKVLTRSDKNRGKSDNVPSEEVVKKMKNYWRQLLNAKLITQRKFDNLTKAERGGLSELDKAGFIKRQLVETRQITKHVAQILDSRMNTKYDENDKLIREVKVITLKSKLVSDFRKDFQFYKVREINNYHHAHDAYLNAVVGTALIKKYPKLESEFVYGDYKVYDVRKMIAKSEQEIGKATAKYFFYSNIMNFFKTEITLANGEIRKRPLIETNGETGEIVWDKGRDFATVRKVLSMPQVNIVKKTEVQTGGFSKESILPKRNSDKLIARKKDWDPKKYGGFDSPTVAYSVLVVAKVEKGKSKKLKSVKELLGITIMERSSFEKNPIDFLEAKGYKEVKKDLIIKLPKYSLFELENGRKRMLASAGELQKGNELALPSKYVNFLYLASHYEKLKGSPEDNEQKQLFVEQHKHYLDEIIEQISEFSKRVILADANLDKVLSAYNKHRDKPIREQAENIIHLFTLTNLGAPAAFKYFDTTIDRKRYTSTKEVLDATLIHQSITGLYETRIDLSQLGGDXPXPXPMVSKGEELFTGVVPILVELDGDVNGHKFSVSGEGEGDATYGKLTLKFICTTGKLPVPWPTLVTTLTYGVQCFSRYPDHMKQHDFFKSAMPEGYVQERTIFFKDDGNYKTRAEVKFEGDTLVNRIELKGIDFKEDGNILGHKLEYNYNSHNVYIMADKQKNGIKVNFKIRHNIEDGSVQLADHYQQNTPIGDGPVLLPDNHYLSTQSALSKDPNEKRDHMVLLEFVTAAGITLGMDELYK

SEQ ID NO: 60 - protein, 1615 aa, synthetic construct
  REGION 1..1615: note = SYNTHETIC
  VARIANT 1369: note = X can be any naturally occurring amino acid
  VARIANT 1371: note = X can be any naturally occurring amino acid
  VARIANT 1373: note = X can be any naturally occurring amino acid
  VARIANT 1375: note = X can be any naturally occurring amino acid
MDKKYSIGLDIGTNSVGWAVITDEYKVPSKKFKVLGNTDRHSIKKNLIGALLFDSGETAEATRLKRTARRRYTRRKNRICYLQEIFSNEMAKVDDSFFHRLEESFLVEEDKKHERHPIFGNIVDEVAYHEKYPTIYHLRKKLVDSTDKADLRLIYLALAHMIKFRGHFLIEGDLNPDNSDVDKLFIQLVQTYNQLFEENPINASGVDAKAILSARLSKSRRLENLIAQLPGEKKNGLFGNLIALSLGLTPNFKSNFDLAEDAKLQLSKDTYDDDLDNLLAQIGDQYADLFLAAKNLSDAILLSDILRVNTEITKAPLSASMIKRYDEHHQDLTLLKALVRQQLPEKYKEIFFDQSKNGYAGYIDGGASQEEFYKFIKPILEKMDGTEELLVKLNREDLLRKQRTFDNGSIPHQIHLGELHAILRRQEDFYPFLKDNREKIEKILTFRIPYYVGPLARGNSRFAWMTRKSEETITPWNFEEVVDKGASAQSFIERMTNFDKNLPNEKVLPKHSLLYEYFTVYNELTKVKYVTEGMRKPAFLSGEQKKAIVDLLFKTNRKVTVKQLKEDYFKKIECFDSVEISGVEDRFNASLGTYHDLLKIIKDKDFLDNEENEDILEDIVLTLTLFEDREMIEERLKTYAHLFDDKVMKQLKRRRYTGWGRLSRKLINGIRDKQSGKTILDFLKSDGFANRNFMQLIHDDSLTFKEDIQKAQVSGQGDSLHEHIANLAGSPAIKKGILQTVKVVDELVKVMGRHKPENIVIEMARENQTTQKGQKNSRERMKRIEEGIKELGSQILKEHPVENTQLQNEKLYLYYLQNGRDMYVDQELDINRLSDYDVDHIVPQSFLKDDSIDNKVLTRSDKNRGKSDNVPSEEVVKKMKNYWRQLLNAKLITQRKFDNLTKAERGGLSELDKAGFIKRQLVETRQITKHVAQILDSRMNTKYDENDKLIREVKVITLKSKLVSDFRKDFQFYKVREINNYHHAHDAYLNAVVGTALIKKYPKLESEFVYGDYKVYDVRKMIAKSEQEIGKATAKYFFYSNIMNFFKTEITLANGEIRKRPLIETNGETGEIVWDKGRDFATVRKVLSMPQVNIVKKTEVQTGGFSKESILPKRNSDKLIARKKDWDPKKYGGFDSPTVAYSVLVVAKVEKGKSKKLKSVKELLGITIMERSSFEKNPIDFLEAKGYKEVKKDLIIKLPKYSLFELENGRKRMLASAGELQKGNELALPSKYVNFLYLASHYEKLKGSPEDNEQKQLFVEQHKHYLDEIIEQISEFSKRVILADANLDKVLSAYNKHRDKPIREQAENIIHLFTLTNLGAPAAFKYFDTTIDRKRYTSTKEVLDATLIHQSITGLYETRIDLSQLGGDXPXPXPXPMVSKGEELFTGVVPILVELDGDVNGHKFSVSGEGEGDATYGKLTLKFICTTGKLPVPWPTLVTTLTYGVQCFSRYPDHMKQHDFFKSAMPEGYVQERTIFFKDDGNYKTRAEVKFEGDTLVNRIELKGIDFKEDGNILGHKLEYNYNSHNVYIMADKQKNGIKVNFKIRHNIEDGSVQLADHYQQNTPIGDGPVLLPDNHYLSTQSALSKDPNEKRDHMVLLEFVTAAGITLGMDELYK

SEQ ID NO: 61 - protein, 1617 aa, synthetic construct
  REGION 1..1617: note = SYNTHETIC
  VARIANT 1369: note = X can be any naturally occurring amino acid
  VARIANT 1371: note = X can be any naturally occurring amino acid
  VARIANT 1373: note = X can be any naturally occurring amino acid
  VARIANT 1375: note = X can be any naturally occurring amino acid
  VARIANT 1377: note = X can be any naturally occurring amino acid
MDKKYSIGLDIGTNSVGWAVITDEYKVPSKKFKVLGNTDRHSIKKNLIGALLFDSGETAEATRLKRTARRRYTRRKNRICYLQEIFSNEMAKVDDSFFHRLEESFLVEEDKKHERHPIFGNIVDEVAYHEKYPTIYHLRKKLVDSTDKADLRLIYLALAHMIKFRGHFLIEGDLNPDNSDVDKLFIQLVQTYNQLFEENPINASGVDAKAILSARLSKSRRLENLIAQLPGEKKNGLFGNLIALSLGLTPNFKSNFDLAEDAKLQLSKDTYDDDLDNLLAQIGDQYADLFLAAKNLSDAILLSDILRVNTEITKAPLSASMIKRYDEHHQDLTLLKALVRQQLPEKYKEIFFDQSKNGYAGYIDGGASQEEFYKFIKPILEKMDGTEELLVKLNREDLLRKQRTFDNGSIPHQIHLGELHAILRRQEDFYPFLKDNREKIEKILTFRIPYYVGPLARGNSRFAWMTRKSEETITPWNFEEVVDKGASAQSFIERMTNFDKNLPNEKVLPKHSLLYEYFTVYNELTKVKYVTEGMRKPAFLSGEQKKAIVDLLFKTNRKVTVKQLKEDYFKKIECFDSVEISGVEDRFNASLGTYHDLLKIIKDKDFLDNEENEDILEDIVLTLTLFEDREMIEERLKTYAHLFDDKVMKQLKRRRYTGWGRLSRKLINGIRDKQSGKTILDFLKSDGFANRNFMQLIHDDSLTFKEDIQKAQVSGQGDSLHEHIANLAGSPAIKKGILQTVKVVDELVKVMGRHKPENIVIEMARENQTTQKGQKNSRERMKRIEEGIKELGSQILKEHPVENTQLQNEKLYLYYLQNGRDMYVDQELDINRLSDYDVDHIVPQSFLKDDSIDNKVLTRSDKNRGKSDNVPSEEVVKKMKNYWRQLLNAKLITQRKFDNLTKAERGGLSELDKAGFIKRQLVETRQITKHVAQILDSRMNTKYDENDKLIREVKVITLKSKLVSDFRKDFQFYKVREINNYHHAHDAYLNAVVGTALIKKYPKLESEFVYGDYKVYDVRKMIAKSEQEIGKATAKYFFYSNIMNFFKTEITLANGEIRKRPLIETNGETGEIVWDKGRDFATVRKVLSMPQVNIVKKTEVQTGGFSKESILPKRNSDKLIARKKDWDPKKYGGFDSPTVAYSVLVVAKVEKGKSKKLKSVKELLGITIMERSSFEKNPIDFLEAKGYKEVKKDLIIKLPKYSLFELENGRKRMLASAGELQKGNELALPSKYVNFLYLASHYEKLKGSPEDNEQKQLFVEQHKHYLDEIIEQISEFSKRVILADANLDKVLSAYNKHRDKPIREQAENIIHLFTLTNLGAPAAFKYFDTTIDRKRYTSTKEVLDATLIHQSITGLYETRIDLSQLGGDXPXPXPXPXPMVSKGEELFTGVVPILVELDGDVNGHKFSVSGEGEGDATYGKLTLKFICTTGKLPVPWPTLVTTLTYGVQCFSRYPDHMKQHDFFKSAMPEGYVQERTIFFKDDGNYKTRAEVKFEGDTLVNRIELKGIDFKEDGNILGHKLEYNYNSHNVYIMADKQKNGIKVNFKIRHNIEDGSVQLADHYQQNTPIGDGPVLLPDNHYLSTQSALSKDPNEKRDHMVLLEFVTAAGITLGMDELYK

SEQ ID NO: 62 - protein, 1619 aa, synthetic construct
  REGION 1..1619: note = SYNTHETIC
  VARIANT 1369: note = X can be any naturally occurring amino acid
  VARIANT 1371: note = X can be any naturally occurring amino acid
  VARIANT 1373: note = X can be any naturally occurring amino acid
  VARIANT 1375: note = X can be any naturally occurring amino acid
  VARIANT 1377: note = X can be any naturally occurring amino acid
  VARIANT 1379: note = X can be any naturally occurring amino acid
MDKKYSIGLDIGTNSVGWAVITDEYKVPSKKFKVLGNTDRHSIKKNLIGALLFDSGETAEATRLKRTARRRYTRRKNRICYLQEIFSNEMAKVDDSFFHRLEESFLVEEDKKHERHPIFGNIVDEVAYHEKYPTIYHLRKKLVDSTDKADLRLIYLALAHMIKFRGHFLIEGDLNPDNSDVDKLFIQLVQTYNQLFEENPINASGVDAKAILSARLSKSRRLENLIAQLPGEKKNGLFGNLIALSLGLTPNFKSNFDLAEDAKLQLSKDTYDDDLDNLLAQIGDQYADLFLAAKNLSDAILLSDILRVNTEITKAPLSASMIKRYDEHHQDLTLLKALVRQQLPEKYKEIFFDQSKNGYAGYIDGGASQEEFYKFIKPILEKMDGTEELLVKLNREDLLRKQRTFDNGSIPHQIHLGELHAILRRQEDFYPFLKDNREKIEKILTFRIPYYVGPLARGNSRFAWMTRKSEETITPWNFEEVVDKGASAQSFIERMTNFDKNLPNEKVLPKHSLLYEYFTVYNELTKVKYVTEGMRKPAFLSGEQKKAIVDLLFKTNRKVTVKQLKEDYFKKIECFDSVEISGVEDRFNASLGTYHDLLKIIKDKDFLDNEENEDILEDIVLTLTLFEDREMIEERLKTYAHLFDDKVMKQLKRRRYTGWGRLSRKLINGIRDKQSGKTILDFLKSDGFANRNFMQLIHDDSLTFKEDIQKAQVSGQGDSLHEHIANLAGSPAIKKGILQTVKVVDELVKVMGRHKPENIVIEMARENQTTQKGQKNSRERMKRIEEGIKELGSQILKEHPVENTQLQNEKLYLYYLQNGRDMYVDQELDINRLSDYDVDHIVPQSFLKDDSIDNKVLTRSDKNRGKSDNVPSEEVVKKMKNYWRQLLNAKLITQRKFDNLTKAERGGLSELDKAGFIKRQLVETRQITKHVAQILDSRMNTKYDENDKLIREVKVITLKSKLVSDFRKDFQFYKVREINNYHHAHDAYLNAVVGTALIKKYPKLESEFVYGDYKVYDVRKMIAKSEQEIGKATAKYFFYSNIMNFFKTEITLANGEIRKRPLIETNGETGEIVWDKGRDFATVRKVLSMPQVNIVKKTEVQTGGFSKESILPKRNSDKLIARKKDWDPKKYGGFDSPTVAYSVLVVAKVEKGKSKKLKSVKELLGITIMERSSFEKNPIDFLEAKGYKEVKKDLIIKLPKYSLFELENGRKRMLASAGELQKGNELALPSKYVNFLYLASHYEKLKGSPEDNEQKQLFVEQHKHYLDEIIEQISEFSKRVILADANLDKVLSAYNKHRDKPIREQAENIIHLFTLTNLGAPAAFKYFDTTIDRKRYTSTKEVLDATLIHQSITGLYETRIDLSQLGGDXPXPXPXPXPXPMVSKGEELFTGVVPILVELDGDVNGHKFSVSGEGEGDATYGKLTLKFICTTGKLPVPWPTLVTTLTYGVQCFSRYPDHMKQHDFFKSAMPEGYVQERTIFFKDDGNYKTRAEVKFEGDTLVNRIELKGIDFKEDGNILGHKLEYNYNSHNVYIMADKQKNGIKVNFKIRHNIEDGSVQLADHYQQNTPIGDGPVLLPDNHYLSTQSALSKDPNEKRDHMVLLEFVTAAGITLGMDELYK

SEQ ID NO: 63 - protein, 1621 aa, synthetic construct
  REGION 1..1621: note = SYNTHETIC
  VARIANT 1369: note = X can be any naturally occurring amino acid
  VARIANT 1371: note = X can be any naturally occurring amino acid
  VARIANT 1373: note = X can be any naturally occurring amino acid
  VARIANT 1375: note = X can be any naturally occurring amino acid
  VARIANT 1377: note = X can be any naturally occurring amino acid
  VARIANT 1379: note = X can be any naturally occurring amino acid
  VARIANT 1381: note = X can be any naturally occurring amino acid
MDKKYSIGLDIGTNSVGWAVITDEYKVPSKKFKVLGNTDRHSIKKNLIGALLFDSGETAEATRLKRTARRRYTRRKNRICYLQEIFSNEMAKVDDSFFHRLEESFLVEEDKKHERHPIFGNIVDEVAYHEKYPTIYHLRKKLVDSTDKADLRLIYLALAHMIKFRGHFLIEGDLNPDNSDVDKLFIQLVQTYNQLFEENPINASGVDAKAILSARLSKSRRLENLIAQLPGEKKNGLFGNLIALSLGLTPNFKSNFDLAEDAKLQLSKDTYDDDLDNLLAQIGDQYADLFLAAKNLSDAILLSDILRVNTEITKAPLSASMIKRYDEHHQDLTLLKALVRQQLPEKYKEIFFDQSKNGYAGYIDGGASQEEFYKFIKPILEKMDGTEELLVKLNREDLLRKQRTFDNGSIPHQIHLGELHAILRRQEDFYPFLKDNREKIEKILTFRIPYYVGPLARGNSRFAWMTRKSEETITPWNFEEVVDKGASAQSFIERMTNFDKNLPNEKVLPKHSLLYEYFTVYNELTKVKYVTEGMRKPAFLSGEQKKAIVDLLFKTNRKVTVKQLKEDYFKKIECFDSVEISGVEDRFNASLGTYHDLLKIIKDKDFLDNEENEDILEDIVLTLTLFEDREMIEERLKTYAHLFDDKVMKQLKRRRYTGWGRLSRKLINGIRDKQSGKTILDFLKSDGFANRNFMQLIHDDSLTFKEDIQKAQVSGQGDSLHEHIANLAGSPAIKKGILQTVKVVDELVKVMGRHKPENIVIEMARENQTTQKGQKNSRERMKRIEEGIKELGSQILKEHPVENTQLQNEKLYLYYLQNGRDMYVDQELDINRLSDYDVDHIVPQSFLKDDSIDNKVLTRSDKNRGKSDNVPSEEVVKKMKNYWRQLLNAKLITQRKFDNLTKAERGGLSELDKAGFIKRQLVETRQITKHVAQILDSRMNTKYDENDKLIREVKVITLKSKLVSDFRKDFQFYKVREINNYHHAHDAYLNAVVGTALIKKYPKLESEFVYGDYKVYDVRKMIAKSEQEIGKATAKYFFYSNIMNFFKTEITLANGEIRKRPLIETNGETGEIVWDKGRDFATVRKVLSMPQVNIVKKTEVQTGGFSKESILPKRNSDKLIARKKDWDPKKYGGFDSPTVAYSVLVVAKVEKGKSKKLKSVKELLGITIMERSSFEKNPIDFLEAKGYKEVKKDLIIKLPKYSLFELENGRKRMLASAGELQKGNELALPSKYVNFLYLASHYEKLKGSPEDNEQKQLFVEQHKHYLDEIIEQISEFSKRVILADANLDKVLSAYNKHRDKPIREQAENIIHLFTLTNLGAPAAFKYFDTTIDRKRYTSTKEVLDATLIHQSITGLYETRIDLSQLGGDXPXPXPXPXPXPXPMVSKGEELFTGVVPILVELDGDVNGHKFSVSGEGEGDATYGKLTLKFICTTGKLPVPWPTLVTTLTYGVQCFSRYPDHMKQHDFFKSAMPEGYVQERTIFFKDDGNYKTRAEVKFEGDTLVNRIELKGIDFKEDGNILGHKLEYNYNSHNVYIMADKQKNGIKVNFKIRHNIEDGSVQLADHYQQNTPIGDGPVLLPDNHYLSTQSALSKDPNEKRDHMVLLEFVTAAGITLGMDELYK

SEQ ID NO: 64 - protein, 1623 aa, synthetic construct
  REGION 1..1623: note = SYNTHETIC
  VARIANT 1369: note = X can be any naturally occurring amino acid
  VARIANT 1371: note = X can be any naturally occurring amino acid
  VARIANT 1373: note = X can be any naturally occurring amino acid
  VARIANT 1375: note = X can be any naturally occurring amino acid
  VARIANT 1377: note = X can be any naturally occurring amino acid
  VARIANT 1379: note = X can be any naturally occurring amino acid
  VARIANT 1381: note = X can be any naturally occurring amino acid
  VARIANT 1383: note = X can be any naturally occurring amino acid
MDKKYSIGLDIGTNSVGWAVITDEYKVPSKKFKVLGNTDRHSIKKNLIGALLFDSGETAEATRLKRTARRRYTRRKNRICYLQEIFSNEMAKVDDSFFHRLEESFLVEEDKKHERHPIFGNIVDEVAYHEKYPTIYHLRKKLVDSTDKADLRLIYLALAHMIKFRGHFLIEGDLNPDNSDVDKLFIQLVQTYNQLFEENPINASGVDAKAILSARLSKSRRLENLIAQLPGEKKNGLFGNLIALSLGLTPNFKSNFDLAEDAKLQLSKDTYDDDLDNLLAQIGDQYADLFLAAKNLSDAILLSDILRVNTEITKAPLSASMIKRYDEHHQDLTLLKALVRQQLPEKYKEIFFDQSKNGYAGYIDGGASQEEFYKFIKPILEKMDGTEELLVKLNREDLLRKQRTFDNGSIPHQIHLGELHAILRRQEDFYPFLKDNREKIEKILTFRIPYYVGPLARGNSRFAWMTRKSEETITPWNFEEVVDKGASAQSFIERMTNFDKNLPNEKVLPKHSLLYEYFTVYNELTKVKYVTEGMRKPAFLSGEQKKAIVDLLFKTNRKVTVKQLKEDYFKKIECFDSVEISGVEDRFNASLGTYHDLLKIIKDKDFLDNEENEDILEDIVLTLTLFEDREMIEERLKTYAHLFDDKVMKQLKRRRYTGWGRLSRKLINGIRDKQSGKTILDFLKSDGFANRNFMQLIHDDSLTFKEDIQKAQVSGQGDSLHEHIANLAGSPAIKKGILQTVKVVDELVKVMGRHKPENIVIEMARENQTTQKGQKNSRERMKRIEEGIKELGSQILKEHPVENTQLQNEKLYLYYLQNGRDMYVDQELDINRLSDYDVDHIVPQSFLKDDSIDNKVLTRSDKNRGKSDNVPSEEVVKKMKNYWRQLLNAKLITQRKFDNLTKAERGGLSELDKAGFIKRQLVETRQITKHVAQILDSRMNTKYDENDKLIREVKVITLKSKLVSDFRKDFQFYKVREINNYHHAHDAYLNAVVGTALIKKYPKLESEFVYGDYKVYDVRKMIAKSEQEIGKATAKYFFYSNIMNFFKTEITLANGEIRKRPLIETNGETGEIVWDKGRDFATVRKVLSMPQVNIVKKTEVQTGGFSKESILPKRNSDKLIARKKDWDPKKYGGFDSPTVAYSVLVVAKVEKGKSKKLKSVKELLGITIMERSSFEKNPIDFLEAKGYKEVKKDLIIKLPKYSLFELENGRKRMLASAGELQKGNELALPSKYVNFLYLASHYEKLKGSPEDNEQKQLFVEQHKHYLDEIIEQISEFSKRVILADANLDKVLSAYNKHRDKPIREQAENIIHLFTLTNLGAPAAFKYFDTTIDRKRYTSTKEVLDATLIHQSITGLYETRIDLSQLGGDXPXPXPXPXPXPXPXPMVSKGEELFTGVVPILVELDGDVNGHKFSVSGEGEGDATYGKLTLKFICTTGKLPVPWPTLVTTLTYGVQCFSRYPDHMKQHDFFKSAMPEGYVQERTIFFKDDGNYKTRAEVKFEGDTLVNRIELKGIDFKEDGNILGHKLEYNYNSHNVYIMADKQKNGIKVNFKIRHNIEDGSVQLADHYQQNTPIGDGPVLLPDNHYLSTQSALSKDPNEKRDHMVLLEFVTAAGITLGMDELYK

SEQ ID NO: 65 - protein, 1625 aa, synthetic construct
  REGION 1..1625: note = SYNTHETIC
  VARIANT 1369: note = X can be any naturally occurring amino acid
  VARIANT 1371: note = X can be any naturally occurring amino acid
  VARIANT 1373: note = X can be any naturally occurring amino acid
  VARIANT 1375: note = X can be any naturally occurring amino acid
  VARIANT 1377: note = X can be any naturally occurring amino acid
  VARIANT 1379: note = X can be any naturally occurring amino acid
  VARIANT 1381: note = X can be any naturally occurring amino acid
  VARIANT 1383: note = X can be any naturally occurring amino acid
  VARIANT 1385: note = X can be any naturally occurring amino acid
MDKKYSIGLDIGTNSVGWAVITDEYKVPSKKFKVLGNTDRHSIKKNLIGALLFDSGETAEATRLKRTARRRYTRRKNRICYLQEIFSNEMAKVDDSFFHRLEESFLVEEDKKHERHPIFGNIVDEVAYHEKYPTIYHLRKKLVDSTDKADLRLIYLALAHMIKFRGHFLIEGDLNPDNSDVDKLFIQLVQTYNQLFEENPINASGVDAKAILSARLSKSRRLENLIAQLPGEKKNGLFGNLIALSLGLTPNFKSNFDLAEDAKLQLSKDTYDDDLDNLLAQIGDQYADLFLAAKNLSDAILLSDILRVNTEITKAPLSASMIKRYDEHHQDLTLLKALVRQQLPEKYKEIFFDQSKNGYAGYIDGGASQEEFYKFIKPILEKMDGTEELLVKLNREDLLRKQRTFDNGSIPHQIHLGELHAILRRQEDFYPFLKDNREKIEKILTFRIPYYVGPLARGNSRFAWMTRKSEETITPWNFEEVVDKGASAQSFIERMTNFDKNLPNEKVLPKHSLLYEYFTVYNELTKVKYVTEGMRKPAFLSGEQKKAIVDLLFKTNRKVTVKQLKEDYFKKIECFDSVEISGVEDRFNASLGTYHDLLKIIKDKDFLDNEENEDILEDIVLTLTLFEDREMIEERLKTYAHLFDDKVMKQLKRRRYTGWGRLSRKLINGIRDKQSGKTILDFLKSDGFANRNFMQLIHDDSLTFKEDIQKAQVSGQGDSLHEHIANLAGSPAIKKGILQTVKVVDELVKVMGRHKPENIVIEMARENQTTQKGQKNSRERMKRIEEGIKELGSQILKEHPVENTQLQNEKLYLYYLQNGRDMYVDQELDINRLSDYDVDHIVPQSFLKDDSIDNKVLTRSDKNRGKSDNVPSEEVVKKMKNYWRQLLNAKLITQRKFDNLTKAERGGLSELDKAGFIKRQLVETRQITKHVAQILDSRMNTKYDENDKLIREVKVITLKSKLVSDFRKDFQFYKVREINNYHHAHDAYLNAVVGTALIKKYPKLESEFVYGDYKVYDVRKMIAKSEQEIGKATAKYFFYSNIMNFFKTEITLANGEIRKRPLIETNGETGEIVWDKGRDFATVRKVLSMPQVNIVKKTEVQTGGFSKESILPKRNSDKLIARKKDWDPKKYGGFDSPTVAYSVLVVAKVEKGKSKKLKSVKELLGITIMERSSFEKNPIDFLEAKGYKEVKKDLIIKLPKYSLFELENGRKRMLASAGELQKGNELALPSKYVNFLYLASHYEKLKGSPEDNEQKQLFVEQHKHYLDEIIEQISEFSKRVILADANLDKVLSAYNKHRDKPIREQAENIIHLFTLTNLGAPAAFKYFDTTIDRKRYTSTKEVLDATLIHQSITGLYETRIDLSQLGGDXPXPXPXPXPXPXPXPXPMVSKGEELFTGVVPILVELDGDVNGHKFSVSGEGEGDATYGKLTLKFICTTGKLPVPWPTLVTTLTYGVQCFSRYPDHMKQHDFFKSAMPEGYVQERTIFFKDDGNYKTRAEVKFEGDTLVNRIELKGIDFKEDGNILGHKLEYNYNSHNVYIMADKQKNGIKVNFKIRHNIEDGSVQLADHYQQNTPIGDGPVLLPDNHYLSTQSALSKDPNEKRDHMVLLEFVTAAGITLGMDELYK

SEQ ID NO: 66 - protein, 1627 aa, synthetic construct
  REGION 1..1627: note = SYNTHETIC
  VARIANT 1369: note = X can be any naturally occurring amino acid
  VARIANT 1371: note = X can be any naturally occurring amino acid
  VARIANT 1373: note = X can be any naturally occurring amino acid
  VARIANT 1375: note = X can be any naturally occurring amino acid
  VARIANT 1377: note = X can be any naturally occurring amino acid
  VARIANT 1379: note = X can be any naturally occurring amino acid
  VARIANT 1381: note = X can be any naturally occurring amino acid
  VARIANT 1383: note = X can be any naturally occurring amino acid
  VARIANT 1385: note = X can be any naturally occurring amino acid
  VARIANT 1387: note = X can be any naturally occurring amino acid
MDKKYSIGLDIGTNSVGWAVITDEYKVPSKKFKVLGNTDRHSIKKNLIGALLFDSGETAEATRLKRTARRRYTRRKNRICYLQEIFSNEMAKVDDSFFHRLEESFLVEEDKKHERHPIFGNIVDEVAYHEKYPTIYHLRKKLVDSTDKADLRLIYLALAHMIKFRGHFLIEGDLNPDNSDVDKLFIQLVQTYNQLFEENPINASGVDAKAILSARLSKSRRLENLIAQLPGEKKNGLFGNLIALSLGLTPNFKSNFDLAEDAKLQLSKDTYDDDLDNLLAQIGDQYADLFLAAKNLSDAILLSDILRVNTEITKAPLSASMIKRYDEHHQDLTLLKALVRQQLPEKYKEIFFDQSKNGYAGYIDGGASQEEFYKFIKPILEKMDGTEELLVKLNREDLLRKQRTFDNGSIPHQIHLGELHAILRRQEDFYPFLKDNREKIEKILTFRIPYYVGPLARGNSRFAWMTRKSEETITPWNFEEVVDKGASAQSFIERMTNFDKNLPNEKVLPKHSLLYEYFTVYNELTKVKYVTEGMRKPAFLSGEQKKAIVDLLFKTNRKVTVKQLKEDYFKKIECFDSVEISGVEDRFNASLGTYHDLLKIIKDKDFLDNEENEDILEDIVLTLTLFEDREMIEERLKTYAHLFDDKVMKQLKRRRYTGWGRLSRKLINGIRDKQSGKTILDFLKSDGFANRNFMQLIHDDSLTFKEDIQKAQVSGQGDSLHEHIANLAGSPAIKKGILQTVKVVDELVKVMGRHKPENIVIEMARENQTTQKGQKNSRERMKRIEEGIKELGSQILKEHPVENTQLQNEKLYLYYLQNGRDMYVDQELDINRLSDYDVDHIVPQSFLKDDSIDNKVLTRSDKNRGKSDNVPSEEVVKKMKNYWRQLLNAKLITQRKFDNLTKAERGGLSELDKAGFIKRQLVETRQITKHVAQILDSRMNTKYDENDKLIREVKVITLKSKLVSDFRKDFQFYKVREINNYHHAHDAYLNAVVGTALIKKYPKLESEFVYGDYKVYDVRKMIAKSEQEIGKATAKYFFYSNIMNFFKTEITLANGEIRKRPLIETNGETGEIVWDKGRDFATVRKVLSMPQVNIVKKTEVQTGGFSKESILPKRNSDKLIARKKDWDPKKYGGFDSPTVAYSVLVVAKVEKGKSKKLKSVKELLGITIMERSSFEKNPIDFLEAKGYKEVKKDLIIKLPKYSLFELENGRKRMLASAGELQKGNELALPSKYVNFLYLASHYEKLKGSPEDNEQKQLFVEQHKHYLDEIIEQISEFSKRVILADANLDKVLSAYNKHRDKPIREQAENIIHLFTLTNLGAPAAFKYFDTTIDRKRYTSTKEVLDATLIHQSITGLYETRIDLSQLGGDXPXPXPXPXPXPXPXPXPXPMVSKGEELFTGVVPILVELDGDVNGHKFSVSGEGEGDATYGKLTLKFICTTGKLPVPWPTLVTTLTYGVQCFSRYPDHMKQHDFFKSAMPEGYVQERTIFFKDDGNYKTRAEVKFEGDTLVNRIELKGIDFKEDGNILGHKLEYNYNSHNVYIMADKQKNGIKVNFKIRHNIEDGSVQLADHYQQNTPIGDGPVLLPDNHYLSTQSALSKDPNEKRDHMVLLEFVTAAGITLGMDELYK

SEQ ID NO: 67 - protein, 1629 aa, synthetic construct
  REGION 1..1629: note = SYNTHETIC
  VARIANT 1369: note = X can be any naturally occurring amino acid
  VARIANT 1371: note = X can be any naturally occurring amino acid
  VARIANT 1373: note = X can be any naturally occurring amino acid
  VARIANT 1375: note = X can be any naturally occurring amino acid
  VARIANT 1377: note = X can be any naturally occurring amino acid
  VARIANT 1379: note = X can be any naturally occurring amino acid
  VARIANT 1381: note = X can be any naturally occurring amino acid
  VARIANT 1383: note = X can be any naturally occurring amino acid
  VARIANT 1385: note = X can be any naturally occurring amino acid
  VARIANT 1387: note = X can be any naturally occurring amino acid
  VARIANT 1389: note = X can be any naturally occurring amino acid
MDKKYSIGLDIGTNSVGWAVITDEYKVPSKKFKVLGNTDRHSIKKNLIGALLFDSGETAEATRLKRTARRRYTRRKNRICYLQEIFSNEMAKVDDSFFHRLEESFLVEEDKKHERHPIFGNIVDEVAYHEKYPTIYHLRKKLVDSTDKADLRLIYLALAHMIKFRGHFLIEGDLNPDNSDVDKLFIQLVQTYNQLFEENPINASGVDAKAILSARLSKSRRLENLIAQLPGEKKNGLFGNLIALSLGLTPNFKSNFDLAEDAKLQLSKDTYDDDLDNLLAQIGDQYADLFLAAKNLSDAILLSDILRVNTEITKAPLSASMIKRYDEHHQDLTLLKALVRQQLPEKYKEIFFDQSKNGYAGYIDGGASQEEFYKFIKPILEKMDGTEELLVKLNREDLLRKQRTFDNGSIPHQIHLGELHAILRRQEDFYPFLKDNREKIEKILTFRIPYYVGPLARGNSRFAWMTRKSEETITPWNFEEVVDKGASAQSFIERMTNFDKNLPNEKVLPKHSLLYEYFTVYNELTKVKYVTEGMRKPAFLSGEQKKAIVDLLFKTNRKVTVKQLKEDYFKKIECFDSVEISGVEDRFNASLGTYHDLLKIIKDKDFLDNEENEDILEDIVLTLTLFEDREMIEERLKTYAHLFDDKVMKQLKRRRYTGWGRLSRKLINGIRDKQSGKTILDFLKSDGFANRNFMQLIHDDSLTFKEDIQKAQVSGQGDSLHEHIANLAGSPAIKKGILQTVKVVDELVKVMGRHKPENIVIEMARENQTTQKGQKNSRERMKRIEEGIKELGSQILKEHPVENTQLQNEKLYLYYLQNGRDMYVDQELDINRLSDYDVDHIVPQSFLKDDSIDNKVLTRSDKNRGKSDNVPSEEVVKKMKNYWRQLLNAKLITQRKFDNLTKAERGGLSELDKAGFIKRQLVETRQITKHVAQILDSRMNTKYDENDKLIREVKVITLKSKLVSDFRKDFQFYKVREINNYHHAHDAYLNAVVGTALIKKYPKLESEFVYGDYKVYDVRKMIAKSEQEIGKATAKYFFYSNIMNFFKTEITLANGEIRKRPLIETNGETGEIVWDKGRDFATVRKVLSMPQVNIVKKTEVQTGGFSKESILPKRNSDKLIARKKDWDPKKYGGFDSPTVAYSVLVVAKVEKGKSKKLKSVKELLGITIMERSSFEKNPIDFLEAKGYKEVKKDLIIKLPKYSLFELENGRKRMLASAGELQKGNELALPSKYVNFLYLASHYEKLKGSPEDNEQKQLFVEQHKHYLDEIIEQISEFSKRVILADANLDKVLSAYNKHRDKPIREQAENIIHLFTLTNLGAPAAFKYFDTTIDRKRYTSTKEVLDATLIHQSITGLYETRIDLSQLGGDXPXPXPXPXPXPXPXPXPXPXPMVSKGEELFTGVVPILVELDGDVNGHKFSVSGEGEGDATYGKLTLKFICTTGKLPVPWPTLVTTLTYGVQCFSRYPDHMKQHDFFKSAMPEGYVQERTIFFKDDGNYKTRAEVKFEGDTLVNRIELKGIDFKEDGNILGHKLEYNYNSHNVYIMADKQKNGIKVNFKIRHNIEDGSVQLADHYQQNTPIGDGPVLLPDNHYLSTQSALSKDPNEKRDHMVLLEFVTAAGITLGMDELYK

SEQ ID NO: 68 - protein, 1631 aa, synthetic construct
  REGION 1..1631: note = SYNTHETIC
  VARIANT 1369: note = X can be any naturally occurring amino acid
  VARIANT 1371: note = X can be any naturally occurring amino acid
  VARIANT 1373: note = X can be any naturally occurring amino acid
  VARIANT 1375: note = X can be any naturally occurring amino acid
  VARIANT 1377: note = X can be any naturally occurring amino acid
  VARIANT 1379: note = X can be any naturally occurring amino acid
  VARIANT 1381: note = X can be any naturally occurring amino acid
  VARIANT 1383: note = X can be any naturally occurring amino acid
  VARIANT 1385: note = X can be any naturally occurring amino acid
  VARIANT 1387: note = X can be any naturally occurring amino acid
  VARIANT 1389: note = X can be any naturally occurring amino acid
  VARIANT 1391: note = X can be any naturally occurring amino acid
MDKKYSIGLDIGTNSVGWAVITDEYKVPSKKFKVLGNTDRHSIKKNLIGALLFDSGETAEATRLKRTARRRYTRRKNRICYLQEIFSNEMAKVDDSFFHRLEESFLVEEDKKHERHPIFGNIVDEVAYHEKYPTIYHLRKKLVDSTDKADLRLIYLALAHMIKFRGHFLIEGDLNPDNSDVDKLFIQLVQTYNQLFEENPINASGVDAKAILSARLSKSRRLENLIAQLPGEKKNGLFGNLIALSLGLTPNFKSNFDLAEDAKLQLSKDTYDDDLDNLLAQIGDQYADLFLAAKNLSDAILLSDILRVNTEITKAPLSASMIKRYDEHHQDLTLLKALVRQQLPEKYKEIFFDQSKNGYAGYIDGGASQEEFYKFIKPILEKMDGTEELLVKLNREDLLRKQRTFDNGSIPHQIHLGELHAILRRQEDFYPFLKDNREKIEKILTFRIPYYVGPLARGNSRFAWMTRKSEETITPWNFEEVVDKGASAQSFIERMTNFDKNLPNEKVLPKHSLLYEYFTVYNELTKVKYVTEGMRKPAFLSGEQKKAIVDLLFKTNRKVTVKQLKEDYFKKIECFDSVEISGVEDRFNASLGTYHDLLKIIKDKDFLDNEENEDILEDIVLTLTLFEDREMIEERLKTYAHLFDDKVMKQLKRRRYTGWGRLSRKLINGIRDKQSGKTILDFLKSDGFANRNFMQLIHDDSLTFKEDIQKAQVSGQGDSLHEHIANLAGSPAIKKGILQTVKVVDELVKVMGRHKPENIVIEMARENQTTQKGQKNSRERMKRIEEGIKELGSQILKEHPVENTQLQNEKLYLYYLQNGRDMYVDQELDINRLSDYDVDHIVPQSFLKDDSIDNKVLTRSDKNRGKSDNVPSEEVVKKMKNYWRQLLNAKLITQRKFDNLTKAERGGLSELDKAGFIKRQLVETRQITKHVAQILDSRMNTKYDENDKLIREVKVITLKSKLVSDFRKDFQFYKVREINNYHHAHDAYLNAVVGTALIKKYPKLESEFVYGDYKVYDVRKMIAKSEQEIGKATAKYFFYSNIMNFFKTEITLANGEIRKRPLIETNGETGEIVWDKGRDFATVRKVLSMPQVNIVKKTEVQTGGFSKESILPKRNSDKLIARKKDWDPKKYGGFDSPTVAYSVLVVAKVEKGKSKKLKSVKELLGITIMERSSFEKNPIDFLEAKGYKEVKKDLIIKLPKYSLFELENGRKRMLASAGELQKGNELALPSKYVNFLYLASHYEKLKGSPEDNEQKQLFVEQHKHYLDEIIEQISEFSKRVILADANLDKVLSAYNKHRDKPIREQAENIIHLFTLTNLGAPAAFKYFDTTIDRKRYTSTKEVLDATLIHQSITGLYETRIDLSQLGGDXPXPXPXPXPXPXPXPXPXPXPXPMVSKGEELFTGVVPILVELDGDVNGHKFSVSGEGEGDATYGKLTLKFICTTGKLPVPWPTLVTTLTYGVQCFSRYPDHMKQHDFFKSAMPEGYVQERTIFFKDDGNYKTRAEVKFEGDTLVNRIELKGIDFKEDGNILGHKLEYNYNSHNVYIMADKQKNGIKVNFKIRHNIEDGSVQLADHYQQNTPIGDGPVLLPDNHYLSTQSALSKDPNEKRDHMVLLEFVTAAGITLGMDELYK

SEQ ID NO: 69 - protein, 1633 aa, synthetic construct
  REGION 1..1633: note = SYNTHETIC
  VARIANT 1369: note = X can be any naturally occurring amino acid
  VARIANT 1371: note = X can be any naturally occurring amino acid
  VARIANT 1373: note = X can be any naturally occurring amino acid
  VARIANT 1375: note = X can be any naturally occurring amino acid
  VARIANT 1377: note = X can be any naturally occurring amino acid
  VARIANT 1379: note = X can be any naturally occurring amino acid
  VARIANT 1381: note = X can be any naturally occurring amino acid
  VARIANT 1383: note = X can be any naturally occurring amino acid
  VARIANT 1385: note = X can be any naturally occurring amino acid
  VARIANT 1387: note = X can be any naturally occurring amino acid
  VARIANT 1389: note = X can be any naturally occurring amino acid
  VARIANT 1391: note = X can be any naturally occurring amino acid
  VARIANT 1393: note = X can be any naturally occurring amino acid
MDKKYSIGLDIGTNSVGWAVITDEYKVPSKKFKVLGNTDRHSIKKNLIGALLFDSGETAEATRLKRTARRRYTRRKNRICYLQEIFSNEMAKVDDSFFHRLEESFLVEEDKKHERHPIFGNIVDEVAYHEKYPTIYHLRKKLVDSTDKADLRLIYLALAHMIKFRGHFLIEGDLNPDNSDVDKLFIQLVQTYNQLFEENPINASGVDAKAILSARLSKSRRLENLIAQLPGEKKNGLFGNLIALSLGLTPNFKSNFDLAEDAKLQLSKDTYDDDLDNLLAQIGDQYADLFLAAKNLSDAILLSDILRVNTEITKAPLSASMIKRYDEHHQDLTLLKALVRQQLPEKYKEIFFDQSKNGYAGYIDGGASQEEFYKFIKPILEKMDGTEELLVKLNREDLLRKQRTFDNGSIPHQIHLGELHAILRRQEDFYPFLKDNREKIEKILTFRIPYYVGPLARGNSRFAWMTRKSEETITPWNFEEVVDKGASAQSFIERMTNFDKNLPNEKVLPKHSLLYEYFTVYNELTKVKYVTEGMRKPAFLSGEQKKAIVDLLFKTNRKVTVKQLKEDYFKKIECFDSVEISGVEDRFNASLGTYHDLLKIIKDKDFLDNEENEDILEDIVLTLTLFEDREMIEERLKTYAHLFDDKVMKQLKRRRYTGWGRLSRKLINGIRDKQSGKTILDFLKSDGFANRNFMQLIHDDSLTFKEDIQKAQVSGQGDSLHEHIANLAGSPAIKKGILQTVKVVDELVKVMGRHKPENIVIEMARENQTTQKGQKNSRERMKRIEEGIKELGSQILKEHPVENTQLQNEKLYLYYLQNGRDMYVDQELDINRLSDYDVDHIVPQSFLKDDSIDNKVLTRSDKNRGKSDNVPSEEVVKKMKNYWRQLLNAKLITQRKFDNLTKAERGGLSELDKAGFIKRQLVETRQITKHVAQILDSRMNTKYDENDKLIREVKVITLKSKLVSDFRKDFQFYKVREINNYHHAHDAYLNAVVGTALIKKYPKLESEFVYGDYKVYDVRKMIAKSEQEIGKATAKYFFYSNIMNFFKTEITLANGEIRKRPLIETNGETGEIVWDKGRDFATVRKVLSMPQVNIVKKTEVQTGGFSKESILPKRNSDKLIARKKDWDPKKYGGFDSPTVAYSVLVVAKVEKGKSKKLKSVKELLGITIMERSSFEKNPIDFLEAKGYKEVKKDLIIKLPKYSLFELENGRKRMLASAGELQKGNELALPSKYVNFLYLASHYEKLKGSPEDNEQKQLFVEQHKHYLDEIIEQISEFSKRVILADANLDKVLSAYNKHRDKPIREQAENIIHLFTLTNLGAPAAFKYFDTTIDRKRYTSTKEVLDATLIHQSITGLYETRIDLSQLGGDXPXPXPXPXPXPXPXPXPXPXPXPXPMVSKGEELFTGVVPILVELDGDVNGHKFSVSGEGEGDATYGKLTLKFICTTGKLPVPWPTLVTTLTYGVQCFSRYPDHMKQHDFFKSAMPEGYVQERTIFFKDDGNYKTRAEVKFEGDTLVNRIELKGIDFKEDGNILGHKLEYNYNSHNVYIMADKQKNGIKVNFKIRHNIEDGSVQLADHYQQNTPIGDGPVLLPDNHYLSTQSALSKDPNEKRDHMVLLEFVTAAGITLGMDELYK

SEQ ID NO: 70 - protein, 1635 aa, synthetic construct
  REGION 1..1635: note = SYNTHETIC
  VARIANT 1369: note = X can be any naturally occurring amino acid
  VARIANT 1371: note = X can be any naturally occurring amino acid
  VARIANT 1373: note = X can be any naturally occurring amino acid
  VARIANT 1375: note = X can be any naturally occurring amino acid
  VARIANT 1377: note = X can be any naturally occurring amino acid
  VARIANT 1379: note = X can be any naturally occurring amino acid
  VARIANT 1381: note = X can be any naturally occurring amino acid
  VARIANT 1383: note = X can be any naturally occurring amino acid
  VARIANT 1385: note = X can be any naturally occurring amino acid
  VARIANT 1387: note = X can be any naturally occurring amino acid
  VARIANT 1389: note = X can be any naturally occurring amino acid
  VARIANT 1391: note = X can be any naturally occurring amino acid
  VARIANT 1393: note = X can be any naturally occurring amino acid
  VARIANT 1395: note = X can be any naturally occurring amino acid
MDKKYSIGLDIGTNSVGWAVITDEYKVPSKKFKVLGNTDRHSIKKNLIGALLFDSGETAEATRLKRTARRRYTRRKNRICYLQEIFSNEMAKVDDSFFHRLEESFLVEEDKKHERHPIFGNIVDEVAYHEKYPTIYHLRKKLVDSTDKADLRLIYLALAHMIKFRGHFLIEGDLNPDNSDVDKLFIQLVQTYNQLFEENPINASGVDAKAILSARLSKSRRLENLIAQLPGEKKNGLFGNLIALSLGLTPNFKSNFDLAEDAKLQLSKDTYDDDLDNLLAQIGDQYADLFLAAKNLSDAILLSDILRVNTEITKAPLSASMIKRYDEHHQDLTLLKALVRQQLPEKYKEIFFDQSKNGYAGYIDGGASQEEFYKFIKPILEKMDGTEELLVKLNREDLLRKQRTFDNGSIPHQIHLGELHAILRRQEDFYPFLKDNREKIEKILTFRIPYYVGPLARGNSRFAWMTRKSEETITPWNFEEVVDKGASAQSFIERMTNFDKNLPNEKVLPKHSLLYEYFTVYNELTKVKYVTEGMRKPAFLSGEQKKAIVDLLFKTNRKVTVKQLKEDYFKKIECFDSVEISGVEDRFNASLGTYHDLLKIIKDKDFLDNEENEDILEDIVLTLTLFEDREMIEERLKTYAHLFDDKVMKQLKRRRYTGWGRLSRKLINGIRDKQSGKTILDFLKSDGFANRNFMQLIHDDSLTFKEDIQKAQVSGQGDSLHEHIANLAGSPAIKKGILQTVKVVDELVKVMGRHKPENIVIEMARENQTTQKGQKNSRERMKRIEEGIKELGSQILKEHPVENTQLQNEKLYLYYLQNGRDMYVDQELDINRLSDYDVDHIVPQSFLKDDSIDNKVLTRSDKNRGKSDNVPSEEVVKKMKNYWRQLLNAKLITQRKFDNLTKAERGGLSELDKAGFIKRQLVETRQITKHVAQILDSRMNTKYDENDKLIREVKVITLKSKLVSDFRKDFQFYKVREINNYHHAHDAYLNAVVGTALIKKYPKLESEFVYGDYKVYDVRKMIAKSEQEIGKATAKYFFYSNIMNFFKTEITLANGEIRKRPLIETNGETGEIVWDKGRDFATVRKVLSMPQVNIVKKTEVQTGGFSKESILPKRNSDKLIARKKDWDPKKYGGFDSPTVAYSVLVVAKVEKGKSKKLKSVKELLGITIMERSSFEKNPIDFLEAKGYKEVKKDLIIKLPKYSLFELENGRKRMLASAGELQKGNELALPSKYVNFLYLASHYEKLKGSPEDNEQKQLFVEQHKHYLDEIIEQISEFSKRVILADANLDKVLSAYNKHRDKPIREQAENIIHLFTLTNLGAPAAFKYFDTTIDRKRYTSTKEVLDATLIHQSITGLYETRIDLSQLGGDXPXPXPXPXPXPXPXPXPXPXPXPXPXPMVSKGEELFTGVVPILVELDGDVNGHKFSVSGEGEGDATYGKLTLKFICTTGKLPVPWPTLVTTLTYGVQCFSRYPDHMKQHDFFKSAMPEGYVQERTIFFKDDGNYKTRAEVKFEGDTLVNRIELKGIDFKEDGNILGHKLEYNYNSHNVYIMADKQKNGIKVNFKIRHNIEDGSVQLADHYQQNTPIGDGPVLLPDNHYLSTQSALSKDPNEKRDHMVLLEFVTAAGITLGMDELYK

SEQ ID NO: 71 - protein, 1622 aa, synthetic construct
  REGION 1..1622: note = SYNTHETIC
MDKKYSIGLDIGTNSVGWAVITDEYKVPSKKFKVLGNTDRHSIKKNLIGALLFDSGETAEATRLKRTARRRYTRRKNRICYLQEIFSNEMAKVDDSFFHRLEESFLVEEDKKHERHPIFGNIVDEVAYHEKYPTIYHLRKKLVDSTDKADLRLIYLALAHMIKFRGHFLIEGDLNPDNSDVDKLFIQLVQTYNQLFEENPINASGVDAKAILSARLSKSRRLENLIAQLPGEKKNGLFGNLIALSLGLTPNFKSNFDLAEDAKLQLSKDTYDDDLDNLLAQIGDQYADLFLAAKNLSDAILLSDILRVNTEITKAPLSASMIKRYDEHHQDLTLLKALVRQQLPEKYKEIFFDQSKNGYAGYIDGGASQEEFYKFIKPILEKMDGTEELLVKLNREDLLRKQRTFDNGSIPHQIHLGELHAILRRQEDFYPFLKDNREKIEKILTFRIPYYVGPLARGNSRFAWMTRKSEETITPWNFEEVVDKGASAQSFIERMTNFDKNLPNEKVLPKHSLLYEYFTVYNELTKVKYVTEGMRKPAFLSGEQKKAIVDLLFKTNRKVTVKQLKEDYFKKIECFDSVEISGVEDRFNASLGTYHDLLKIIKDKDFLDNEENEDILEDIVLTLTLFEDREMIEERLKTYAHLFDDKVMKQLKRRRYTGWGRLSRKLINGIRDKQSGKTILDFLKSDGFANRNFMQLIHDDSLTFKEDIQKAQVSGQGDSLHEHIANLAGSPAIKKGILQTVKVVDELVKVMGRHKPENIVIEMARENQTTQKGQKNSRERMKRIEEGIKELGSQILKEHPVENTQLQNEKLYLYYLQNGRDMYVDQELDINRLSDYDVDHIVPQSFLKDDSIDNKVLTRSDKNRGKSDNVPSEEVVKKMKNYWRQLLNAKLITQRKFDNLTKAERGGLSELDKAGFIKRQLVETRQITKHVAQILDSRMNTKYDENDKLIREVKVITLKSKLVSDFRKDFQFYKVREINNYHHAHDAYLNAVVGTALIKKYPKLESEFVYGDYKVYDVRKMIAKSEQEIGKATAKYFFYSNIMNFFKTEITLANGEIRKRPLIETNGETGEIVWDKGRDFATVRKVLSMPQVNIVKKTEVQTGGFSKESILPKRNSDKLIARKKDWDPKKYGGFDSPTVAYSVLVVAKVEKGKSKKLKSVKELLGITIMERSSFEKNPIDFLEAKGYKEVKKDLIIKLPKYSLFELENGRKRMLASAGELQKGNELALPSKYVNFLYLASHYEKLKGSPEDNEQKQLFVEQHKHYLDEIIEQISEFSKRVILADANLDKVLSAYNKHRDKPIREQAENIIHLFTLTNLGAPAAFKYFDTTIDRKRYTSTKEVLDATLIHQSITGLYETRIDLSQLGGDGGGGSEAAAKGGGGSMVSKGEELFTGVVPILVELDGDVNGHKFSVSGEGEGDATYGKLTLKFICTTGKLPVPWPTLVTTLTYGVQCFSRYPDHMKQHDFFKSAMPEGYVQERTIFFKDDGNYKTRAEVKFEGDTLVNRIELKGIDFKEDGNILGHKLEYNYNSHNVYIMADKQKNGIKVNFKIRHNIEDGSVQLADHYQQNTPIGDGPVLLPDNHYLSTQSALSKDPNEKRDHMVLLEFVTAAGITLGMDELYK

SEQ ID NO: 72 - protein, 1616 aa, synthetic construct
  REGION 1..1616: note = SYNTHETIC
MDKKYSIGLDIGTNSVGWAVITDEYKVPSKKFKVLGNTDRHSIKKNLIGALLFDSGETAEATRLKRTARRRYTRRKNRICYLQEIFSNEMAKVDDSFFHRLEESFLVEEDKKHERHPIFGNIVDEVAYHEKYPTIYHLRKKLVDSTDKADLRLIYLALAHMIKFRGHFLIEGDLNPDNSDVDKLFIQLVQTYNQLFEENPINASGVDAKAILSARLSKSRRLENLIAQLPGEKKNGLFGNLIALSLGLTPNFKSNFDLAEDAKLQLSKDTYDDDLDNLLAQIGDQYADLFLAAKNLSDAILLSDILRVNTEITKAPLSASMIKRYDEHHQDLTLLKALVRQQLPEKYKEIFFDQSKNGYAGYIDGGASQEEFYKFIKPILEKMDGTEELLVKLNREDLLRKQRTFDNGSIPHQIHLGELHAILRRQEDFYPFLKDNREKIEKILTFRIPYYVGPLARGNSRFAWMTRKSEETITPWNFEEVVDKGASAQSFIERMTNFDKNLPNEKVLPKHSLLYEYFTVYNELTKVKYVTEGMRKPAFLSGEQKKAIVDLLFKTNRKVTVKQLKEDYFKKIECFDSVEISGVEDRFNASLGTYHDLLKIIKDKDFLDNEENEDILEDIVLTLTLFEDREMIEERLKTYAHLFDDKVMKQLKRRRYTGWGRLSRKLINGIRDKQSGKTILDFLKSDGFANRNFMQLIHDDSLTFKEDIQKAQVSGQGDSLHEHIANLAGSPAIKKGILQTVKVVDELVKVMGRHKPENIVIEMARENQTTQKGQKNSRERMKRIEEGIKELGSQILKEHPVENTQLQNEKLYLYYLQNGRDMYVDQELDINRLSDYDVDHIVPQSFLKDDSIDNKVLTRSDKNRGKSDNVPSEEVVKKMKNYWRQLLNAKLITQRKFDNLTKAERGGLSELDKAGFIKRQLVETRQITKHVAQILDSRMNTKYDENDKLIREVKVITLKSKLVSDFRKDFQFYKVREINNYHHAHDAYLNAVVGTALIKKYPKLESEFVYGDYKVYDVRKMIAKSEQEIGKATAKYFFYSNIMNFFKTEITLANGEIRKRPLIETNGETGEIVWDKGRDFATVRKVLSMPQVNIVKKTEVQTGGFSKESILPKRNSDKLIARKKDWDPKKYGGFDSPTVAYSVLVVAKVEKGKSKKLKSVKELLGITIMERSSFEKNPIDFLEAKGYKEVKKDLIIKLPKYSLFELENGRKRMLASAGELQKGNELALPSKYVNFLYLASHYEKLKGSPEDNEQKQLFVEQHKHYLDEIIEQISEFSKRVILADANLDKVLSAYNKHRDKPIREQAENIIHLFTLTNLGAPAAFKYFDTTIDRKRYTSTKEVLDATLIHQSITGLYETRIDLSQLGGDGSAGSAAGSGEFMVSKGEEDNMAIIKEFMRFKVHMEGSVNGHEFEIEGEGEGRPYEGTQTAKLKVTKGGPLPFAWDILSPQFMYGSKAYVKHPADIPDYLKLSFPEGFKWERVMNFEDGGVVTVTQDSSLQDGEFIYKVKLRGTNFPSDGPVMQKKTMGWEASSERMYPEDGALKGEIKQRLKLKDGGHYDAEVKTTYKAKKPVQLPGAYNVNIKLDITSHNEDYTIVEQYERAEGRHSTGGMDELYK

SEQ ID NO: 73 - protein, 1624 aa, synthetic construct
  REGION 1..1624: note = SYNTHETIC
MDKKYSIGLDIGTNSVGWAVITDEYKVPSKKFKVLGNTDRHSIKKNLIGALLFDSGETAEATRLKRTARRRYTRRKNRICYLQEIFSNEMAKVDDSFFHRLEESFLVEEDKKHERHPIFGNIVDEVAYHEKYPTIYHLRKKLVDSTDKADLRLIYLALAHMIKFRGHFLIEGDLNPDNSDVDKLFIQLVQTYNQLFEENPINASGVDAKAILSARLSKSRRLENLIAQLPGEKKNGLFGNLIALSLGLTPNFKSNFDLAEDAKLQLSKDTYDDDLDNLLAQIGDQYADLFLAAKNLSDAILLSDILRVNTEITKAPLSASMIKRYDEHHQDLTLLKALVRQQLPEKYKEIFFDQSKNGYAGYIDGGASQEEFYKFIKPILEKMDGTEELLVKLNREDLLRKQRTFDNGSIPHQIHLGELHAILRRQEDFYPFLKDNREKIEKILTFRIPYYVGPLARGNSRFAWMTRKSEETITPWNFEEVVDKGASAQSFIERMTNFDKNLPNEKVLPKHSLLYEYFTVYNELTKVKYVTEGMRKPAFLSGEQKKAIVDLLFKTNRKVTVKQLKEDYFKKIECFDSVEISGVEDRFNASLGTYHDLLKIIKDKDFLDNEENEDILEDIVLTLTLFEDREMIEERLKTYAHLFDDKVMKQLKRRRYTGWGRLSRKLINGIRDKQSGKTILDFLKSDGFANRNFMQLIHDDSLTFKEDIQKAQVSGQGDSLHEHIANLAGSPAIKKGILQTVKVVDELVKVMGRHKPENIVIEMARENQTTQKGQKNSRERMKRIEEGIKELGSQILKEHPVENTQLQNEKLYLYYLQNGRDMYVDQELDINRLSDYDVDHIVPQSFLKDDSIDNKVLTRSDKNRGKSDNVPSEEVVKKMKNYWRQLLNAKLITQRKFDNLTKAERGGLSELDKAGFIKRQLVETRQITKHVAQILDSRMNTKYDENDKLIREVKVITLKSKLVSDFRKDFQFYKVREINNYHHAHDAYLNAVVGTALIKKYPKLESEFVYGDYKVYDVRKMIAKSEQEIGKATAKYFFYSNIMNFFKTEITLANGEIRKRPLIETNGETGEIVWDKGRDFATVRKVLSMPQVNIVKKTEVQTGGFSKESILPKRNSDKLIARKKDWDPKKYGGFDSPTVAYSVLVVAKVEKGKSKKLKSVKELLGITIMERSSFEKNPIDFLEAKGYKEVKKDLIIKLPKYSLFELENGRKRMLASAGELQKGNELALPSKYVNFLYLASHYEKLKGSPEDNEQKQLFVEQHKHYLDEIIEQISEFSKRVILADANLDKVLSAYNKHRDKPIREQAENIIHLFTLTNLGAPAAFKYFDTTIDRKRYTSTKEVLDATLIHQSITGLYETRIDLSQLGGDGGGGSGGGGSGGGGSGGGGSMVSKGEEDNMAIIKEFMRFKVHMEGSVNGHEFEIEGEGEGRPYEGTQTAKLKVTKGGPLPFAWDILSPQFMYGSKAYVKHPADIPDYLKLSFPEGFKWERVMNFEDGGVVTVTQDSSLQDGEFIYKVKLRGTNFPSDGPVMQKKTMGWEASSERMYPEDGALKGEIKQRLKLKDGGHYDAEVKTTYKAKKPVQLPGAYNVNIKLDITSHNEDYTIVEQYERAEGRHSTGGMDELYK

SEQ ID NO: 74 - protein, 1626 aa, synthetic construct
  REGION 1..1626: note = SYNTHETIC
MDKKYSIGLDIGTNSVGWAVITDEYKVPSKKFKVLGNTDRHSIKKNLIGALLFDSGETAEATRLKRTARRRYTRRKNRICYLQEIFSNEMAKVDDSFFHRLEESFLVEEDKKHERHPIFGNIVDEVAYHEKYPTIYHLRKKLVDSTDKADLRLIYLALAHMIKFRGHFLIEGDLNPDNSDVDKLFIQLVQTYNQLFEENPINASGVDAKAILSARLSKSRRLENLIAQLPGEKKNGLFGNLIALSLGLTPNFKSNFDLAEDAKLQLSKDTYDDDLDNLLAQIGDQYADLFLAAKNLSDAILLSDILRVNTEITKAPLSASMIKRYDEHHQDLTLLKALVRQQLPEKYKEIFFDQSKNGYAGYIDGGASQEEFYKFIKPILEKMDGTEELLVKLNREDLLRKQRTFDNGSIPHQIHLGELHAILRRQEDFYPFLKDNREKIEKILTFRIPYYVGPLARGNSRFAWMTRKSEETITPWNFEEVVDKGASAQSFIERMTNFDKNLPNEKVLPKHSLLYEYFTVYNELTKVKYVTEGMRKPAFLSGEQKKAIVDLLFKTNRKVTVKQLKEDYFKKIECFDSVEISGVEDRFNASLGTYHDLLKIIKDKDFLDNEENEDILEDIVLTLTLFEDREMIEERLKTYAHLFDDKVMKQLKRRRYTGWGRLSRKLINGIRDKQSGKTILDFLKSDGFANRNFMQLIHDDSLTFKEDIQKAQVSGQGDSLHEHIANLAGSPAIKKGILQTVKVVDELVKVMGRHKPENIVIEMARENQTTQKGQKNSRERMKRIEEGIKELGSQILKEHPVENTQLQNEKLYLYYLQNGRDMYVDQELDINRLSDYDVDHIVPQSFLKDDSIDNKVLTRSDKNRGKSDNVPSEEVVKKMKNYWRQLLNAKLITQRKFDNLTKAERGGLSELDKAGFIKRQLVETRQITKHVAQILDSRMNTKYDENDKLIREVKVITLKSKLVSDFRKDFQFYKVREINNYHHAHDAYLNAVVGTALIKKYPKLESEFVYGDYKVYDVRKMIAKSEQEIGKATAKYFFYSNIMNFFKTEITLANGEIRKRPLIETNGETGEIVWDKGRDFATVRKVLSMPQVNIVKKTEVQTGGFSKESILPKRNSDKLIARKKDWDPKKYGGFDSPTVAYSVLVVAKVEKGKSKKLKSVKELLGITIMERSSFEKNPIDFLEAKGYKEVKKDLIIKLPKYSLFELENGRKRMLASAGELQKGNELALPSKYVNFLYLASHYEKLKGSPEDNEQKQLFVEQHKHYLDEIIEQISEFSKRVILADANLDKVLSAYNKHRDKPIREQAENIIHLFTLTNLGAPAAFKYFDTTIDRKRYTSTKEVLDATLIHQSITGLYETRIDLSQLGGDAEAAAKEAAAKEAAAKEAAAKAMVSKGEEDNMAIIKEFMRFKVHMEGSVNGHEFEIEGEGEGRPYEGTQTAKLKVTKGGPLPFAWDILSPQFMYGSKAYVKHPADIPDYLKLSFPEGFKWERVMNFEDGGVVTVTQDSSLQDGEFIYKVKLRGTNFPSDGPVMQKKTMGWEASSERMYPEDGALKGEIKQRLKLKDGGHYDAEVKTTYKAKKPVQLPGAYNVNIKLDITSHNEDYTIVEQYERAEGRHSTGGMDELYK

SEQ ID NO: 75 - protein, 1650 aa, synthetic construct
  REGION 1..1650: note = SYNTHETIC
MDKKYSIGLDIGTNSVGWAVITDEYKVPSKKFKVLGNTDRHSIKKNLIGALLFDSGETAEATRLKRTARRRYTRRKNRICYLQEIFSNEMAKVDDSFFHRLEESFLVEEDKKHERHPIFGNIVDEVAYHEKYPTIYHLRKKLVDSTDKADLRLIYLALAHMIKFRGHFLIEGDLNPDNSDVDKLFIQLVQTYNQLFEENPINASGVDAKAILSARLSKSRRLENLIAQLPGEKKNGLFGNLIALSLGLTPNFKSNFDLAEDAKLQLSKDTYDDDLDNLLAQIGDQYADLFLAAKNLSDAILLSDILRVNTEITKAPLSASMIKRYDEHHQDLTLLKALVRQQLPEKYKEIFFDQSKNGYAGYIDGGASQEEFYKFIKPILEKMDGTEELLVKLNREDLLRKQRTFDNGSIPHQIHLGELHAILRRQEDFYPFLKDNREKIEKILTFRIPYYVGPLARGNSRFAWMTRKSEETITPWNFEEVVDKGASAQSFIERMTNFDKNLPNEKVLPKHSLLYEYFTVYNELTKVKYVTEGMRKPAFLSGEQKKAIVDLLFKTNRKVTVKQLKEDYFKKIECFDSVEISGVEDRFNASLGTYHDLLKIIKDKDFLDNEENEDILEDIVLTLTLFEDREMIEERLKTYAHLFDDKVMKQLKRRRYTGWGRLSRKLINGIRDKQSGKTILDFLKSDGFANRNFMQLIHDDSLTFKEDIQKAQVSGQGDSLHEHIANLAGSPAIKKGILQTVKVVDELVKVMGRHKPENIVIEMARENQTTQKGQKNSRERMKRIEEGIKELGSQILKEHPVENTQLQNEKLYLYYLQNGRDMYVDQELDINRLSDYDVDHIVPQSFLKDDSIDNKVLTRSDKNRGKSDNVPSEEVVKKMKNYWRQLLNAKLITQRKFDNLTKAERGGLSELDKAGFIKRQLVETRQITKHVAQILDSRMNTKYDENDKLIREVKVITLKSKLVSDFRKDFQFYKVREINNYHHAHDAYLNAVVGTALIKKYPKLESEFVYGDYKVYDVRKMIAKSEQEIGKATAKYFFYSNIMNFFKTEITLANGEIRKRPLIETNGETGEIVWDKGRDFATVRKVLSMPQVNIVKKTEVQTGGFSKESILPKRNSDKLIARKKDWDPKKYGGFDSPTVAYSVLVVAKVEKGKSKKLKSVKELLGITIMERSSFEKNPIDFLEAKGYKEVKKDLIIKLPKYSLFELENGRKRMLASAGELQKGNELALPSKYVNFLYLASHYEKLKGSPEDNEQKQLFVEQHKHYLDEIIEQISEFSKRVILADANLDKVLSAYNKHRDKPIREQAENIIHLFTLTNLGAPAAFKYFDTTIDRKRYTSTKEVLDATLIHQSITGLYETRIDLSQLGGDAEAAAKEAAAKEAAAKEAAAKALEAEAAAKEAAAKEAAAKEAAAKAMVSKGEEDNMAIIKEFMRFKVHMEGSVNGHEFEIEGEGEGRPYEGTQTAKLKVTKGGPLPFAWDILSPQFMYGSKAYVKHPADIPDYLKLSFPEGFKWERVMNFEDGGVVTVTQDSSLQDGEFIYKVKLRGTNFPSDGPVMQKKTMGWEASSERMYPEDGALKGEIKQRLKLKDGGHYDAEVKTTYKAKKPVQLPGAYNVNIKLDITSHNEDYTIVEQYERAEGRHSTGGMDELYK

SEQ ID NO: 76 - protein, 1654 aa, synthetic construct
  REGION 1..1654: note = SYNTHETIC
MDKKYSIGLDIGTNSVGWAVITDEYKVPSKKFKVLGNTDRHSIKKNLIGALLFDSGETAEATRLKRTARRRYTRRKNRICYLQEIFSNEMAKVDDSFFHRLEESFLVEEDKKHERHPIFGNIVDEVAYHEKYPTIYHLRKKLVDSTDKADLRLIYLALAHMIKFRGHFLIEGDLNPDNSDVDKLFIQLVQTYNQLFEENPINASGVDAKAILSARLSKSRRLENLIAQLPGEKKNGLFGNLIALSLGLTPNFKSNFDLAEDAKLQLSKDTYDDDLDNLLAQIGDQYADLFLAAKNLSDAILLSDILRVNTEITKAPLSASMIKRYDEHHQDLTLLKALVRQQLPEKYKEIFFDQSKNGYAGYIDGGASQEEFYKFIKPILEKMDGTEELLVKLNREDLLRKQRTFDNGSIPHQIHLGELHAILRRQEDFYPFLKDNREKIEKILTFRIPYYVGPLARGNSRFAWMTRKSEETITPWNFEEVVDKGASAQSFIERMTNFDKNLPNEKVLPKHSLLYEYFTVYNELTKVKYVTEGMRKPAFLSGEQKKAIVDLLFKTNRKVTVKQLKEDYFKKIECFDSVEISGVEDRFNASLGTYHDLLKIIKDKDFLDNEENEDILEDIVLTLTLFEDREMIEERLKTYAHLFDDKVMKQLKRRRYTGWGRLSRKLINGIRDKQSGKTILDFLKSDGFANRNFMQLIHDDSLTFKEDIQKAQVSGQGDSLHEHIANLAGSPAIKKGILQTVKVVDELVKVMGRHKPENIVIEMARENQTTQKGQKNSRERMKRIEEGIKELGSQILKEHPVENTQLQNEKLYLYYLQNGRDMYVDQELDINRLSDYDVDHIVPQSFLKDDSIDNKVLTRSDKNRGKSDNVPSEEVVKKMKNYWRQLLNAKLITQRKFDNLTKAERGGLSELDKAGFIKRQLVETRQITKHVAQILDSRMNTKYDENDKLIREVKVITLKSKLVSDFRKDFQFYKVREINNYHHAHDAYLNAVVGTALIKKYPKLESEFVYGDYKVYDVRKMIAKSEQEIGKATAKYFFYSNIMNFFKTEITLANGEIRKRPLIETNGETGEIVWDKGRDFATVRKVLSMPQVNIVKKTEVQTGGFSKESILPKRNSDKLIARKKDWDPKKYGGFDSPTVAYSVLVVAKVEKGKSKKLKSVKELLGITIMERSSFEKNPIDFLEAKGYKEVKKDLIIKLPKYSLFELENGRKRMLASAGELQKGNELALPSKYVNFLYLASHYEKLKGSPEDNEQKQLFVEQHKHYLDEIIEQISEFSKRVILADANLDKVLSAYNKHRDKPIREQAENIIHLFTLTNLGAPAAFKYFDTTIDRKRYTSTKEVLDATLIHQSITGLYETRIDLSQLGGDLEAEAAAKEAAAKEAAAKEAAAKALEAEAAAKEAAAKEAAAKEAAAKALEMVSKGEEDNMAIIKEFMRFKVHMEGSVNGHEFEIEGEGEGRPYEGTQTAKLKVTKGGPLPFAWDILSPQFMYGSKAYVKHPADIPDYLKLSFPEGFKWERVMNFEDGGVVTVTQDSSLQDGEFIYKVKLRGTNFPSDGPVMQKKTMGWEASSERMYPEDGALKGEIKQRLKLKDGGHYDAEVKTTYKAKKPVQLPGAYNVNIKLDITSHNEDYTIVEQYERAEGRHSTGGMDELYK

SEQ ID NO: 77 - protein, 1607 aa, synthetic construct
  REGION 1..1607: note = SYNTHETIC
MDKKYSIGLDIGTNSVGWAVITDEYKVPSKKFKVLGNTDRHSIKKNLIGALLFDSGETAEATRLKRTARRRYTRRKNRICYLQEIFSNEMAKVDDSFFHRLEESFLVEEDKKHERHPIFGNIVDEVAYHEKYPTIYHLRKKLVDSTDKADLRLIYLALAHMIKFRGHFLIEGDLNPDNSDVDKLFIQLVQTYNQLFEENPINASGVDAKAILSARLSKSRRLENLIAQLPGEKKNGLFGNLIALSLGLTPNFKSNFDLAEDAKLQLSKDTYDDDLDNLLAQIGDQYADLFLAAKNLSDAILLSDILRVNTEITKAPLSASMIKRYDEHHQDLTLLKALVRQQLPEKYKEIFFDQSKNGYAGYIDGGASQEEFYKFIKPILEKMDGTEELLVKLNREDLLRKQRTFDNGSIPHQIHLGELHAILRRQEDFYPFLKDNREKIEKILTFRIPYYVGPLARGNSRFAWMTRKSEETITPWNFEEVVDKGASAQSFIERMTNFDKNLPNEKVLPKHSLLYEYFTVYNELTKVKYVTEGMRKPAFLSGEQKKAIVDLLFKTNRKVTVKQLKEDYFKKIECFDSVEISGVEDRFNASLGTYHDLLKIIKDKDFLDNEENEDILEDIVLTLTLFEDREMIEERLKTYAHLFDDKVMKQLKRRRYTGWGRLSRKLINGIRDKQSGKTILDFLKSDGFANRNFMQLIHDDSLTFKEDIQKAQVSGQGDSLHEHIANLAGSPAIKKGILQTVKVVDELVKVMGRHKPENIVIEMARENQTTQKGQKNSRERMKRIEEGIKELGSQILKEHPVENTQLQNEKLYLYYLQNGRDMYVDQELDINRLSDYDVDHIVPQSFLKDDSIDNKVLTRSDKNRGKSDNVPSEEVVKKMKNYWRQLLNAKLITQRKFDNLTKAERGGLSELDKAGFIKRQLVETRQITKHVAQILDSRMNTKYDENDKLIREVKVITLKSKLVSDFRKDFQFYKVREINNYHHAHDAYLNAVVGTALIKKYPKLESEFVYGDYKVYDVRKMIAKSEQEIGKATAKYFFYSNIMNFFKTEITLANGEIRKRPLIETNGETGEIVWDKGRDFATVRKVLSMPQVNIVKKTEVQTGGFSKESILPKRNSDKLIARKKDWDPKKYGGFDSPTVAYSVLVVAKVEKGKSKKLKSVKELLGITIMERSSFEKNPIDFLEAKGYKEVKKDLIIKLPKYSLFELENGRKRMLASAGELQKGNELALPSKYVNFLYLASHYEKLKGSPEDNEQKQLFVEQHKHYLDEIIEQISEFSKRVILADANLDKVLSAYNKHRDKPIREQAENIIHLFTLTNLGAPAAFKYFDTTIDRKRYTSTKEVLDATLIHQSITGLYETRIDLSQLGGDAPAMVSKGEEDNMAIIKEFMRFKVHMEGSVNGHEFEIEGEGEGRPYEGTQTAKLKVTKGGPLPFAWDILSPQFMYGSKAYVKHPADIPDYLKLSFPEGFKWERVMNFEDGGVVTVTQDSSLQDGEFIYKVKLRGTNFPSDGPVMQKKTMGWEASSERMYPEDGALKGEIKQRLKLKDGGHYDAEVKTTYKAKKPVQLPGAYNVNIKLDITSHNEDYTIVEQYERAEGRHSTGGMDELYK

SEQ ID NO: 78 - protein, 1609 aa, synthetic construct
  REGION 1..1609: note = SYNTHETIC
MDKKYSIGLDIGTNSVGWAVITDEYKVPSKKFKVLGNTDRHSIKKNLIGALLFDSGETAEATRLKRTARRRYTRRKNRICYLQEIFSNEMAKVDDSFFHRLEESFLVEEDKKHERHPIFGNIVDEVAYHEKYPTIYHLRKKLVDSTDKADLRLIYLALAHMIKFRGHFLIEGDLNPDNSDVDKLFIQLVQTYNQLFEENPINASGVDAKAILSARLSKSRRLENLIAQLPGEKKNGLFGNLIALSLGLTPNFKSNFDLAEDAKLQLSKDTYDDDLDNLLAQIGDQYADLFLAAKNLSDAILLSDILRVNTEITKAPLSASMIKRYDEHHQDLTLLKALVRQQLPEKYKEIFFDQSKNGYAGYIDGGASQEEFYKFIKPILEKMDGTEELLVKLNREDLLRKQRTFDNGSIPHQIHLGELHAILRRQEDFYPFLKDNREKIEKILTFRIPYYVGPLARGNSRFAWMTRKSEETITPWNFEEVVDKGASAQSFIERMTNFDKNLPNEKVLPKHSLLYEYFTVYNELTKVKYVTEGMRKPAFLSGEQKKAIVDLLFKTNRKVTVKQLKEDYFKKIECFDSVEISGVEDRFNASLGTYHDLLKIIKDKDFLDNEENEDILEDIVLTLTLFEDREMIEERLKTYAHLFDDKVMKQLKRRRYTGWGRLSRKLINGIRDKQSGKTILDFLKSDGFANRNFMQLIHDDSLTFKEDIQKAQVSGQGDSLHEHIANLAGSPAIKKGILQTVKVVDELVKVMGRHKPENIVIEMARENQTTQKGQKNSRERMKRIEEGIKELGSQILKEHPVENTQLQNEKLYLYYLQNGRDMYVDQELDINRLSDYDVDHIVPQSFLKDDSIDNKVLTRSDKNRGKSDNVPSEEVVKKMKNYWRQLLNAKLITQRKFDNLTKAERGGLSELDKAGFIKRQLVETRQITKHVAQILDSRMNTKYDENDKLIREVKVITLKSKLVSDFRKDFQFYKVREINNYHHAHDAYLNAVVGTALIKKYPKLESEFVYGDYKVYDVRKMIAKSEQEIGKATAKYFFYSNIMNFFKTEITLANGEIRKRPLIETNGETGEIVWDKGRDFATVRKVLSMPQVNIVKKTEVQTGGFSKESILPKRNSDKLIARKKDWDPKKYGGFDSPTVAYSVLVVAKVEKGKSKKLKSVKELLGITIMERSSFEKNPIDFLEAKGYKEVKKDLIIKLPKYSLFELENGRKRMLASAGELQKGNELALPSKYVNFLYLASHYEKLKGSPEDNEQKQLFVEQHKHYLDEIIEQISEFSKRVILADANLDKVLSAYNKHRDKPIREQAENIIHLFTLTNLGAPAAFKYFDTTIDRKRYTSTKEVLDATLIHQSITGLYETRIDLSQLGGDAPAPAMVSKGEEDNMAIIKEFMRFKVHMEGSVNGHEFEIEGEGEGRPYEGTQTAKLKVTKGGPLPFAWDILSPQFMYGSKAYVKHPADIPDYLKLSFPEGFKWERVMNFEDGGVVTVTQDSSLQDGEFIYKVKLRGTNFPSDGPVMQKKTMGWEASSERMYPEDGALKGEIKQRLKLKDGGHYDAEVKTTYKAKKPVQLPGAYNVNIKLDITSHNEDYTIVEQYERAEGRHSTGGMDELYK

SEQ ID NO: 79 - protein, 1611 aa, synthetic construct
  REGION 1..1611: note = SYNTHETIC
MDKKYSIGLDIGTNSVGWAVITDEYKVPSKKFKVLGNTDRHSIKKNLIGALLFDSGETAEATRLKRTARRRYTRRKNRICYLQEIFSNEMAKVDDSFFHRLEESFLVEEDKKHERHPIFGNIVDEVAYHEKYPTIYHLRKKLVDSTDKADLRLIYLALAHMIKFRGHFLIEGDLNPDNSDVDKLFIQLVQTYNQLFEENPINASGVDAKAILSARLSKSRRLENLIAQLPGEKKNGLFGNLIALSLGLTPNFKSNFDLAEDAKLQLSKDTYDDDLDNLLAQIGDQYADLFLAAKNLSDAILLSDILRVNTEITKAPLSASMIKRYDEHHQDLTLLKALVRQQLPEKYKEIFFDQSKNGYAGYIDGGASQEEFYKFIKPILEKMDGTEELLVKLNREDLLRKQRTFDNGSIPHQIHLGELHAILRRQEDFYPFLKDNREKIEKILTFRIPYYVGPLARGNSRFAWMTRKSEETITPWNFEEVVDKGASAQSFIERMTNFDKNLPNEKVLPKHSLLYEYFTVYNELTKVKYVTEGMRKPAFLSGEQKKAIVDLLFKTNRKVTVKQLKEDYFKKIECFDSVEISGVEDRFNASLGTYHDLLKIIKDKDFLDNEENEDILEDIVLTLTLFEDREMIEERLKTYAHLFDDKVMKQLKRRRYTGWGRLSRKLINGIRDKQSGKTILDFLKSDGFANRNFMQLIHDDSLTFKEDIQKAQVSGQGDSLHEHIANLAGSPAIKKGILQTVKVVDELVKVMGRHKPENIVIEMARENQTTQKGQKNSRERMKRIEEGIKELGSQILKEHPVENTQLQNEKLYLYYLQNGRDMYVDQELDINRLSDYDVDHIVPQSFLKDDSIDNKVLTRSDKNRGKSDNVPSEEVVKKMKNYWRQLLNAKLITQRKFDNLTKAERGGLSELDKAGFIKRQLVETRQITKHVAQILDSRMNTKYDENDKLIREVKVITLKSKLVSDFRKDFQFYKVREINNYHHAHDAYLNAVVGTALIKKYPKLESEFVYGDYKVYDVRKMIAKSEQEIGKATAKYFFYSNIMNFFKTEITLANGEIRKRPLIETNGETGEIVWDKGRDFATVRKVLSMPQVNIVKKTEVQTGGFSKESILPKRNSDKLIARKKDWDPKKYGGFDSPTVAYSVLVVAKVEKGKSKKLKSVKELLGITIMERSSFEKNPIDFLEAKGYKEVKKDLIIKLPKYSLFELENGRKRMLASAGELQKGNELALPSKYVNFLYLASHYEKLKGSPEDNEQKQLFVEQHKHYLDEIIEQISEFSKRVILADANLDKVLSAYNKHRDKPIREQAENIIHLFTLTNLGAPAAFKYFDTTIDRKRYTSTKEVLDATLIHQSITGLYETRIDLSQLGGDAPAPAPAMVSKGEEDNMAIIKEFMRFKVHMEGSVNGHEFEIEGEGEGRPYEGTQTAKLKVTKGGPLPFAWDILSPQFMYGSKAYVKHPADIPDYLKLSFPEGFKWERVMNFEDGGVVTVTQDSSLQDGEFIYKVKLRGTNFPSDGPVMQKKTMGWEASSERMYPEDGALKGEIKQRLKLKDGGHYDAEVKTTYKAKKPVQLPGAYNVNIKLDITSHNEDYTIVEQYERAEGRHSTGGMDELYK

SEQ ID NO: 80 - protein, 1613 aa, synthetic construct
  REGION 1..1613: note = SYNTHETIC
MDKKYSIGLDIGTNSVGWAVITDEYKVPSKKFKVLGNTDRHSIKKNLIGALLFDSGETAEATRLKRTARRRYTRRKNRICYLQEIFSNEMAKVDDSFFHRLEESFLVEEDKKHERHPIFGNIVDEVAYHEKYPTIYHLRKKLVDSTDKADLRLIYLALAHMIKFRGHFLIEGDLNPDNSDVDKLFIQLVQTYNQLFEENPINASGVDAKAILSARLSKSRRLENLIAQLPGEKKNGLFGNLIALSLGLTPNFKSNFDLAEDAKLQLSKDTYDDDLDNLLAQIGDQYADLFLAAKNLSDAILLSDILRVNTEITKAPLSASMIKRYDEHHQDLTLLKALVRQQLPEKYKEIFFDQSKNGYAGYIDGGASQEEFYKFIKPILEKMDGTEELLVKLNREDLLRKQRTFDNGSIPHQIHLGELHAILRRQEDFYPFLKDNREKIEKILTFRIPYYVGPLARGNSRFAWMTRKSEETITPWNFEEVVDKGASAQSFIERMTNFDKNLPNEKVLPKHSLLYEYFTVYNELTKVKYVTEGMRKPAFLSGEQKKAIVDLLFKTNRKVTVKQLKEDYFKKIECFDSVEISGVEDRFNASLGTYHDLLKIIKDKDFLDNEENEDILEDIVLTLTLFEDREMIEERLKTYAHLFDDKVMKQLKRRRYTGWGRLSRKLINGIRDKQSGKTILDFLKSDGFANRNFMQLIHDDSLTFKEDIQKAQVSGQGDSLHEHIANLAGSPAIKKGILQTVKVVDELVKVMGRHKPENIVIEMARENQTTQKGQKNSRERMKRIEEGIKELGSQILKEHPVENTQLQNEKLYLYYLQNGRDMYVDQELDINRLSDYDVDHIVPQSFLKDDSIDNKVLTRSDKNRGKSDNVPSEEVVKKMKNYWRQLLNAKLITQRKFDNLTKAERGGLSELDKAGFIKRQLVETRQITKHVAQILDSRMNTKYDENDKLIREVKVITLKSKLVSDFRKDFQFYKVREINNYHHAHDAYLNAVVGTALIKKYPKLESEFVYGDYKVYDVRKMIAKSEQEIGKATAKYFFYSNIMNFFKTEITLANGEIRKRPLIETNGETGEIVWDKGRDFATVRKVLSMPQVNIVKKTEVQTGGFSKESILPKRNSDKLIARKKDWDPKKYGGFDSPTVAYSVLVVAKVEKGKSKKLKSVKELLGITIMERSSFEKNPIDFLEAKGYKEVKKDLIIKLPKYSLFELENGRKRMLASAGELQKGNELALPSKYVNFLYLASHYEKLKGSPEDNEQKQLFVEQHKHYLDEIIEQISEFSKRVILADANLDKVLSAYNKHRDKPIREQAENIIHLFTLTNLGAPAAFKYFDTTIDRKRYTSTKEVLDATLIHQSITGLYETRIDLSQLGGDAPAPAPAPAMVSKGEEDNMAIIKEFMRFKVHMEGSVNGHEFEIEGEGEGRPYEGTQTAKLKVTKGGPLPFAWDILSPQFMYGSKAYVKHPADIPDYLKLSFPEGFKWERVMNFEDGGVVTVTQDSSLQDGEFIYKVKLRGTNFPSDGPVMQKKTMGWEASSERMYPEDGALKGEIKQRLKLKDGGHYDAEVKTTYKAKKPVQLPGAYNVNIKLDITSHNEDYTIVEQYERAEGRHSTGGMDELYK

SEQ ID NO: 81 - protein, 1615 aa, synthetic construct
  REGION 1..1615: note = SYNTHETIC
MDKKYSIGLDIGTNSVGWAVITDEYKVPSKKFKVLGNTDRHSIKKNLIGALLFDSGETAEATRLKRTARRRYTRRKNRICYLQEIFSNEMAKVDDSFFHRLEESFLVEEDKKHERHPIFGNIVDEVAYHEKYPTIYHLRKKLVDSTDKADLRLIYLALAHMIKFRGHFLIEGDLNPDNSDVDKLFIQLVQTYNQLFEENPINASGVDAKAILSARLSKSRRLENLIAQLPGEKKNGLFGNLIALSLGLTPNFKSNFDLAEDAKLQLSKDTYDDDLDNLLAQIGDQYADLFLAAKNLSDAILLSDILRVNTEITKAPLSASMIKRYDEHHQDLTLLKALVRQQLPEKYKEIFFDQSKNGYAGYIDGGASQEEFYKFIKPILEKMDGTEELLVKLNREDLLRKQRTFDNGSIPHQIHLGELHAILRRQEDFYPFLKDNREKIEKILTFRIPYYVGPLARGNSRFAWMTRKSEETITPWNFEEVVDKGASAQSFIERMTNFDKNLPNEKVLPKHSLLYEYFTVYNELTKVKYVTEGMRKPAFLSGEQKKAIVDLLFKTNRKVTVKQLKEDYFKKIECFDSVEISGVEDRFNASLGTYHDLLKIIKDKDFLDNEENEDILEDIVLTLTLFEDREMIEERLKTYAHLFDDKVMKQLKRRRYTGWGRLSRKLINGIRDKQSGKTILDFLKSDGFANRNFMQLIHDDSLTFKEDIQKAQVSGQGDSLHEHIANLAGSPAIKKGILQTVKVVDELVKVMGRHKPENIVIEMARENQTTQKGQKNSRERMKRIEEGIKELGSQILKEHPVENTQLQNEKLYLYYLQNGRDMYVDQELDINRLSDYDVDHIVPQSFLKDDSIDNKVLTRSDKNRGKSDNVPSEEVVKKMKNYWRQLLNAKLITQRKFDNLTKAERGGLSELDKAGFIKRQLVETRQITKHVAQILDSRMNTKYDENDKLIREVKVITLKSKLVSDFRKDFQFYKVREINNYHHAHDAYLNAVVGTALIKKYPKLESEFVYGDYKVYDVRKMIAKSEQEIGKATAKYFFYSNIMNFFKTEITLANGEIRKRPLIETNGETGEIVWDKGRDFATVRKVLSMPQVNIVKKTEVQTGGFSKESILPKRNSDKLIARKKDWDPKKYGGFDSPTVAYSVLVVAKVEKGKSKKLKSVKELLGITIMERSSFEKNPIDFLEAKGYKEVKKDLIIKLPKYSLFELENGRKRMLASAGELQKGNELALPSKYVNFLYLASHYEKLKGSPEDNEQKQLFVEQHKHYLDEIIEQISEFSKRVILADANLDKVLSAYNKHRDKPIREQAENIIHLFTLTNLGAPAAFKYFDTTIDRKRYTSTKEVLDATLIHQSITGLYETRIDLSQLGGDAPAPAPAPAPAMVSKGEEDNMAIIKEFMRFKVHMEGSVNGHEFEIEGEGEGRPYEGTQTAKLKVTKGGPLPFAWDILSPQFMYGSKAYVKHPADIPDYLKLSFPEGFKWERVMNFEDGGVVTVTQDSSLQDGEFIYKVKLRGTNFPSDGPVMQKKTMGWEASSERMYPEDGALKGEIKQRLKLKDGGHYDAEVKTTYKAKKPVQLPGAYNVNIKLDITSHNEDYTIVEQYERAEGRHSTGGMDELYK

SEQ ID NO: 82 - protein, 1617 aa, synthetic construct
  REGION 1..1617: note = SYNTHETIC
MDKKYSIGLDIGTNSVGWAVITDEYKVPSKKFKVLGNTDRHSIKKNLIGALLFDSGETAEATRLKRTARRRYTRRKNRICYLQEIFSNEMAKVDDSFFHRLEESFLVEEDKKHERHPIFGNIVDEVAYHEKYPTIYHLRKKLVDSTDKADLRLIYLALAHMIKFRGHFLIEGDLNPDNSDVDKLFIQLVQTYNQLFEENPINASGVDAKAILSARLSKSRRLENLIAQLPGEKKNGLFGNLIALSLGLTPNFKSNFDLAEDAKLQLSKDTYDDDLDNLLAQIGDQYADLFLAAKNLSDAILLSDILRVNTEITKAPLSASMIKRYDEHHQDLTLLKALVRQQLPEKYKEIFFDQSKNGYAGYIDGGASQEEFYKFIKPILEKMDGTEELLVKLNREDLLRKQRTFDNGSIPHQIHLGELHAILRRQEDFYPFLKDNREKIEKILTFRIPYYVGPLARGNSRFAWMTRKSEETITPWNFEEVVDKGASAQSFIERMTNFDKNLPNEKVLPKHSLLYEYFTVYNELTKVKYVTEGMRKPAFLSGEQKKAIVDLLFKTNRKVTVKQLKEDYFKKIECFDSVEISGVEDRFNASLGTYHDLLKIIKDKDFLDNEENEDILEDIVLTLTLFEDREMIEERLKTYAHLFDDKVMKQLKRRRYTGWGRLSRKLINGIRDKQSGKTILDFLKSDGFANRNFMQLIHDDSLTFKEDIQKAQVSGQGDSLHEHIANLAGSPAIKKGILQTVKVVDELVKVMGRHKPENIVIEMARENQTTQKGQKNSRERMKRIEEGIKELGSQILKEHPVENTQLQNEKLYLYYLQNGRDMYVDQELDINRLSDYDVDHIVPQSFLKDDSIDNKVLTRSDKNRGKSDNVPSEEVVKKMKNYWRQLLNAKLITQRKFDNLTKAERGGLSELDKAGFIKRQLVETRQITKHVAQILDSRMNTKYDENDKLIREVKVITLKSKLVSDFRKDFQFYKVREINNYHHAHDAYLNAVVGTALIKKYPKLESEFVYGDYKVYDVRKMIAKSEQEIGKATAKYFFYSNIMNFFKTEITLANGEIRKRPLIETNGETGEIVWDKGRDFATVRKVLSMPQVNIVKKTEVQTGGFSKESILPKRNSDKLIARKKDWDPKKYGGFDSPTVAYSVLVVAKVEKGKSKKLKSVKELLGITIMERSSFEKNPIDFLEAKGYKEVKKDLIIKLPKYSLFELENGRKRMLASAGELQKGNELALPSKYVNFLYLASHYEKLKGSPEDNEQKQLFVEQHKHYLDEIIEQISEFSKRVILADANLDKVLSAYNKHRDKPIREQAENIIHLFTLTNLGAPAAFKYFDTTIDRKRYTSTKEVLDATLIHQSITGLYETRIDLSQLGGDAPAPAPAPAPAPAMVSKGEEDNMAIIKEFMRFKVHMEGSVNGHEFEIEGEGEGRPYEGTQTAKLKVTKGGPLPFAWDILSPQFMYGSKAYVKHPADIPDYLKLSFPEGFKWERVMNFEDGGVVTVTQDSSLQDGEFIYKVKLRGTNFPSDGPVMQKKTMGWEASSERMYPEDGALKGEIKQRLKLKDGGHYDAEVKTTYKAKKPVQLPGAYNVNIKLDITSHNEDYTIVEQYERAEGRHSTGGMDELYK

SEQ ID NO: 83 - protein, 1619 aa, synthetic construct
  REGION 1..1619: note = SYNTHETIC
MDKKYSIGLDIGTNSVGWAVITDEYKVPSKKFKVLGNTDRHSIKKNLIGALLFDSGETAEATRLKRTARRRYTRRKNRICYLQEIFSNEMAKVDDSFFHRLEESFLVEEDKKHERHPIFGNIVDEVAYHEKYPTIYHLRKKLVDSTDKADLRLIYLALAHMIKFRGHFLIEGDLNPDNSDVDKLFIQLVQTYNQLFEENPINASGVDAKAILSARLSKSRRLENLIAQLPGEKKNGLFGNLIALSLGLTPNFKSNFDLAEDAKLQLSKDTYDDDLDNLLAQIGDQYADLFLAAKNLSDAILLSDILRVNTEITKAPLSASMIKRYDEHHQDLTLLKALVRQQLPEKYKEIFFDQSKNGYAGYIDGGASQEEFYKFIKPILEKMDGTEELLVKLNREDLLRKQRTFDNGSIPHQIHLGELHAILRRQEDFYPFLKDNREKIEKILTFRIPYYVGPLARGNSRFAWMTRKSEETITPWNFEEVVDKGASAQSFIERMTNFDKNLPNEKVLPKHSLLYEYFTVYNELTKVKYVTEGMRKPAFLSGEQKKAIVDLLFKTNRKVTVKQLKEDYFKKIECFDSVEISGVEDRFNASLGTYHDLLKIIKDKDFLDNEENEDILEDIVLTLTLFEDREMIEERLKTYAHLFDDKVMKQLKRRRYTGWGRLSRKLINGIRDKQSGKTILDFLKSDGFANRNFMQLIHDDSLTFKEDIQKAQVSGQGDSLHEHIANLAGSPAIKKGILQTVKVVDELVKVMGRHKPENIVIEMARENQTTQKGQKNSRERMKRIEEGIKELGSQILKEHPVENTQLQNEKLYLYYLQNGRDMYVDQELDINRLSDYDVDHIVPQSFLKDDSIDNKVLTRSDKNRGKSDNVPSEEVVKKMKNYWRQLLNAKLITQRKFDNLTKAERGGLSELDKAGFIKRQLVETRQITKHVAQILDSRMNTKYDENDKLIREVKVITLKSKLVSDFRKDFQFYKVREINNYHHAHDAYLNAVVGTALIKKYPKLESEFVYGDYKVYDVRKMIAKSEQEIGKATAKYFFYSNIMNFFKTEITLANGEIRKRPLIETNGETGEIVWDKGRDFATVRKVLSMPQVNIVKKTEVQTGGFSKESILPKRNSDKLIARKKDWDPKKYGGFDSPTVAYSVLVVAKVEKGKSKKLKSVKELLGITIMERSSFEKNPIDFLEAKGYKEVKKDLIIKLPKYSLFELENGRKRMLASAGELQKGNELALPSKYVNFLYLASHYEKLKGSPEDNEQKQLFVEQHKHYLDEIIEQISEFSKRVILADANLDKVLSAYNKHRDKPIREQAENIIHLFTLTNLGAPAAFKYFDTTIDRKRYTSTKEVLDATLIHQSITGLYETRIDLSQLGGDAPAPAPAPAPAPAPAMVSKGEEDNMAIIKEFMRFKVHMEGSVNGHEFEIEGEGEGRPYEGTQTAKLKVTKGGPLPFAWDILSPQFMYGSKAYVKHPADIPDYLKLSFPEGFKWERVMNFEDGGVVTVTQDSSLQDGEFIYKVKLRGTNFPSDGPVMQKKTMGWEASSERMYPEDGALKGEIKQRLKLKDGGHYDAEVKTTYKAKKPVQLPGAYNVNIKLDITSHNEDYTIVEQYERAEGRHSTGGMDELYK

SEQ ID NO: 84 - protein, 1621 aa, synthetic construct
  REGION 1..1621: note = SYNTHETIC
MDKKYSIGLDIGTNSVGWAVITDEYKVPSKKFKVLGNTDRHSIKKNLIGALLFDSGETAEATRLKRTARRRYTRRKNRICYLQEIFSNEMAKVDDSFFHRLEESFLVEEDKKHERHPIFGNIVDEVAYHEKYPTIYHLRKKLVDSTDKADLRLIYLALAHMIKFRGHFLIEGDLNPDNSDVDKLFIQLVQTYNQLFEENPINASGVDAKAILSARLSKSRRLENLIAQLPGEKKNGLFGNLIALSLGLTPNFKSNFDLAEDAKLQLSKDTYDDDLDNLLAQIGDQYADLFLAAKNLSDAILLSDILRVNTEITKAPLSASMIKRYDEHHQDLTLLKALVRQQLPEKYKEIFFDQSKNGYAGYIDGGASQEEFYKFIKPILEKMDGTEELLVKLNREDLLRKQRTFDNGSIPHQIHLGELHAILRRQEDFYPFLKDNREKIEKILTFRIPYYVGPLARGNSRFAWMTRKSEETITPWNFEEVVDKGASAQSFIERMTNFDKNLPNEKVLPKHSLLYEYFTVYNELTKVKYVTEGMRKPAFLSGEQKKAIVDLLFKTNRKVTVKQLKEDYFKKIECFDSVEISGVEDRFNASLGTYHDLLKIIKDKDFLDNEENEDILEDIVLTLTLFEDREMIEERLKTYAHLFDDKVMKQLKRRRYTGWGRLSRKLINGIRDKQSGKTILDFLKSDGFANRNFMQLIHDDSLTFKEDIQKAQVSGQGDSLHEHIANLAGSPAIKKGILQTVKVVDELVKVMGRHKPENIVIEMARENQTTQKGQKNSRERMKRIEEGIKELGSQILKEHPVENTQLQNEKLYLYYLQNGRDMYVDQELDINRLSDYDVDHIVPQSFLKDDSIDNKVLTRSDKNRGKSDNVPSEEVVKKMKNYWRQLLNAKLITQRKFDNLTKAERGGLSELDKAGFIKRQLVETRQITKHVAQILDSRMNTKYDENDKLIREVKVITLKSKLVSDFRKDFQFYKVREINNYHHAHDAYLNAVVGTALIKKYPKLESEFVYGDYKVYDVRKMIAKSEQEIGKATAKYFFYSNIMNFFKTEITLANGEIRKRPLIETNGETGEIVWDKGRDFATVRKVLSMPQVNIVKKTEVQTGGFSKESILPKRNSDKLIARKKDWDPKKYGGFDSPTVAYSVLVVAKVEKGKSKKLKSVKELLGITIMERSSFEKNPIDFLEAKGYKEVKKDLIIKLPKYSLFELENGRKRMLASAGELQKGNELALPSKYVNFLYLASHYEKLKGSPEDNEQKQLFVEQHKHYLDEIIEQISEFSKRVILADANLDKVLSAYNKHRDKPIREQAENIIHLFTLTNLGAPAAFKYFDTTIDRKRYTSTKEVLDATLIHQSITGLYETRIDLSQLGGDAPAPAPAPAPAPAPAPAMVSKGEEDNMAIIKEFMRFKVHMEGSVNGHEFEIEGEGEGRPYEGTQTAKLKVTKGGPLPFAWDILSPQFMYGSKAYVKHPADIPDYLKLSFPEGFKWERVMNFEDGGVVTVTQDSSLQDGEFIYKVKLRGTNFPSDGPVMQKKTMGWEASSERMYPEDGALKGEIKQRLKLKDGGHYDAEVKTTYKAKKPVQLPGAYNVNIKLDITSHNEDYTIVEQYERAEGRHSTGGMDELYK

SEQ ID NO: 85 - protein, 1623 aa, synthetic construct
  REGION 1..1623: note = SYNTHETIC
MDKKYSIGLDIGTNSVGWAVITDEYKVPSKKFKVLGNTDRHSIKKNLIGALLFDSGETAEATRLKRTARRRYTRRKNRICYLQEIFSNEMAKVDDSFFHRLEESFLVEEDKKHERHPIFGNIVDEVAYHEKYPTIYHLRKKLVDSTDKADLRLIYLALAHMIKFRGHFLIEGDLNPDNSDVDKLFIQLVQTYNQLFEENPINASGVDAKAILSARLSKSRRLENLIAQLPGEKKNGLFGNLIALSLGLTPNFKSNFDLAEDAKLQLSKDTYDDDLDNLLAQIGDQYADLFLAAKNLSDAILLSDILRVNTEITKAPLSASMIKRYDEHHQDLTLLKALVRQQLPEKYKEIFFDQSKNGYAGYIDGGASQEEFYKFIKPILEKMDGTEELLVKLNREDLLRKQRTFDNGSIPHQIHLGELHAILRRQEDFYPFLKDNREKIEKILTFRIPYYVGPLARGNSRFAWMTRKSEETITPWNFEEVVDKGASAQSFIERMTNFDKNLPNEKVLPKHSLLYEYFTVYNELTKVKYVTEGMRKPAFLSGEQKKAIVDLLFKTNRKVTVKQLKEDYFKKIECFDSVEISGVEDRFNASLGTYHDLLKIIKDKDFLDNEENEDILEDIVLTLTLFEDREMIEERLKTYAHLFDDKVMKQLKRRRYTGWGRLSRKLINGIRDKQSGKTILDFLKSDGFANRNFMQLIHDDSLTFKEDIQKAQVSGQGDSLHEHIANLAGSPAIKKGILQTVKVVDELVKVMGRHKPENIVIEMARENQTTQKGQKNSRERMKRIEEGIKELGSQILKEHPVENTQLQNEKLYLYYLQNGRDMYVDQELDINRLSDYDVDHIVPQSFLKDDSIDNKVLTRSDKNRGKSDNVPSEEVVKKMKNYWRQLLNAKLITQRKFDNLTKAERGGLSELDKAGFIKRQLVETRQITKHVAQILDSRMNTKYDENDKLIREVKVITLKSKLVSDFRKDFQFYKVREINNYHHAHDAYLNAVVGTALIKKYPKLESEFVYGDYKVYDVRKMIAKSEQEIGKATAKYFFYSNIMNFFKTEITLANGEIRKRPLIETNGETGEIVWDKGRDFATVRKVLSMPQVNIVKKTEVQTGGFSKESILPKRNSDKLIARKKDWDPKKYGGFDSPTVAYSVLVVAKVEKGKSKKLKSVKELLGITIMERSSFEKNPIDFLEAKGYKEVKKDLIIKLPKYSLFELENGRKRMLASAGELQKGNELALPSKYVNFLYLASHYEKLKGSPEDNEQKQLFVEQHKHYLDEIIEQISEFSKRVILADANLDKVLSAYNKHRDKPIREQAENIIHLFTLTNLGAPAAFKYFDTTIDRKRYTSTKEVLDATLIHQSITGLYETRIDLSQLGGDAPAPAPAPAPAPAPAPAPAMVSKGEEDNMAIIKEFMRFKVHMEGSVNGHEFEIEGEGEGRPYEGTQTAKLKVTKGGPLPFAWDILSPQFMYGSKAYVKHPADIPDYLKLSFPEGFKWERVMNFEDGGVVTVTQDSSLQDGEFIYKVKLRGTNFPSDGPVMQKKTMGWEASSERMYPEDGALKGEIKQRLKLKDGGHYDAEVKTTYKAKKPVQLPGAYNVNIKLDITSHNEDYTIVEQYERAEGRHSTGGMDELYK

SEQ ID NO: 86 - protein, 1625 aa, synthetic construct
  REGION 1..1625: note = SYNTHETIC
MDKKYSIGLDIGTNSVGWAVITDEYKVPSKKFKVLGNTDRHSIKKNLIGALLFDSGETAEATRLKRTARRRYTRRKNRICYLQEIFSNEMAKVDDSFFHRLEESFLVEEDKKHERHPIFGNIVDEVAYHEKYPTIYHLRKKLVDSTDKADLRLIYLALAHMIKFRGHFLIEGDLNPDNSDVDKLFIQLVQTYNQLFEENPINASGVDAKAILSARLSKSRRLENLIAQLPGEKKNGLFGNLIALSLGLTPNFKSNFDLAEDAKLQLSKDTYDDDLDNLLAQIGDQYADLFLAAKNLSDAILLSDILRVNTEITKAPLSASMIKRYDEHHQDLTLLKALVRQQLPEKYKEIFFDQSKNGYAGYIDGGASQEEFYKFIKPILEKMDGTEELLVKLNREDLLRKQRTFDNGSIPHQIHLGELHAILRRQEDFYPFLKDNREKIEKILTFRIPYYVGPLARGNSRFAWMTRKSEETITPWNFEEVVDKGASAQSFIERMTNFDKNLPNEKVLPKHSLLYEYFTVYNELTKVKYVTEGMRKPAFLSGEQKKAIVDLLFKTNRKVTVKQLKEDYFKKIECFDSVEISGVEDRFNASLGTYHDLLKIIKDKDFLDNEENEDILEDIVLTLTLFEDREMIEERLKTYAHLFDDKVMKQLKRRRYTGWGRLSRKLINGIRDKQSGKTILDFLKSDGFANRNFMQLIHDDSLTFKEDIQKAQVSGQGDSLHEHIANLAGSPAIKKGILQTVKVVDELVKVMGRHKPENIVIEMARENQTTQKGQKNSRERMKRIEEGIKELGSQILKEHPVENTQLQNEKLYLYYLQNGRDMYVDQELDINRLSDYDVDHIVPQSFLKDDSIDNKVLTRSDKNRGKSDNVPSEEVVKKMKNYWRQLLNAKLITQRKFDNLTKAERGGLSELDKAGFIKRQLVETRQITKHVAQILDSRMNTKYDENDKLIREVKVITLKSKLVSDFRKDFQFYKVREINNYHHAHDAYLNAVVGTALIKKYPKLESEFVYGDYKVYDVRKMIAKSEQEIGKATAKYFFYSNIMNFFKTEITLANGEIRKRPLIETNGETGEIVWDKGRDFATVRKVLSMPQVNIVKKTEVQTGGFSKESILPKRNSDKLIARKKDWDPKKYGGFDSPTVAYSVLVVAKVEKGKSKKLKSVKELLGITIMERSSFEKNPIDFLEAKGYKEVKKDLIIKLPKYSLFELENGRKRMLASAGELQKGNELALPSKYVNFLYLASHYEKLKGSPEDNEQKQLFVEQHKHYLDEIIEQISEFSKRVILADANLDKVLSAYNKHRDKPIREQAENIIHLFTLTNLGAPAAFKYFDTTIDRKRYTSTKEVLDATLIHQSITGLYETRIDLSQLGGDAPAPAPAPAPAPAPAPAPAPAMVSKGEEDNMAIIKEFMRFKVHMEGSVNGHEFEIEGEGEGRPYEGTQTAKLKVTKGGPLPFAWDILSPQFMYGSKAYVKHPADIPDYLKLSFPEGFKWERVMNFEDGGVVTVTQDSSLQDGEFIYKVKLRGTNFPSDGPVMQKKTMGWEASSERMYPEDGALKGEIKQRLKLKDGGHYDAEVKTTYKAKKPVQLPGAYNVNIKLDITSHNEDYTIVEQYERAEGRHSTGGMDELYK

SEQ ID NO: 87 - protein, 1627 aa, synthetic construct
  REGION 1..1627: note = SYNTHETIC
MDKKYSIGLDIGTNSVGWAVITDEYKVPSKKFKVLGNTDRHSIKKNLIGALLFDSGETAEATRLKRTARRRYTRRKNRICYLQEIFSNEMAKVDDSFFHRLEESFLVEEDKKHERHPIFGNIVDEVAYHEKYPTIYHLRKKLVDSTDKADLRLIYLALAHMIKFRGHFLIEGDLNPDNSDVDKLFIQLVQTYNQLFEENPINASGVDAKAILSARLSKSRRLENLIAQLPGEKKNGLFGNLIALSLGLTPNFKSNFDLAEDAKLQLSKDTYDDDLDNLLAQIGDQYADLFLAAKNLSDAILLSDILRVNTEITKAPLSASMIKRYDEHHQDLTLLKALVRQQLPEKYKEIFFDQSKNGYAGYIDGGASQEEFYKFIKPILEKMDGTEELLVKLNREDLLRKQRTFDNGSIPHQIHLGELHAILRRQEDFYPFLKDNREKIEKILTFRIPYYVGPLARGNSRFAWMTRKSEETITPWNFEEVVDKGASAQSFIERMTNFDKNLPNEKVLPKHSLLYEYFTVYNELTKVKYVTEGMRKPAFLSGEQKKAIVDLLFKTNRKVTVKQLKEDYFKKIECFDSVEISGVEDRFNASLGTYHDLLKIIKDKDFLDNEENEDILEDIVLTLTLFEDREMIEERLKTYAHLFDDKVMKQLKRRRYTGWGRLSRKLINGIRDKQSGKTILDFLKSDGFANRNFMQLIHDDSLTFKEDIQKAQVSGQGDSLHEHIANLAGSPAIKKGILQTVKVVDELVKVMGRHKPENIVIEMARENQTTQKGQKNSRERMKRIEEGIKELGSQILKEHPVENTQLQNEKLYLYYLQNGRDMYVDQELDINRLSDYDVDHIVPQSFLKDDSIDNKVLTRSDKNRGKSDNVPSEEVVKKMKNYWRQLLNAKLITQRKFDNLTKAERGGLSELDKAGFIKRQLVETRQITKHVAQILDSRMNTKYDENDKLIREVKVITLKSKLVSDFRKDFQFYKVREINNYHHAHDAYLNAVVGTALIKKYPKLESEFVYGDYKVYDVRKMIAKSEQEIGKATAKYFFYSNIMNFFKTEITLANGEIRKRPLIETNGETGEIVWDKGRDFATVRKVLSMPQVNIVKKTEVQTGGFSKESILPKRNSDKLIARKKDWDPKKYGGFDSPTVAYSVLVVAKVEKGKSKKLKSVKELLGITIMERSSFEKNPIDFLEAKGYKEVKKDLIIKLPKYSLFELENGRKRMLASAGELQKGNELALPSKYVNFLYLASHYEKLKGSPEDNEQKQLFVEQHKHYLDEIIEQISEFSKRVILADANLDKVLSAYNKHRDKPIREQAENIIHLFTLTNLGAPAAFKYFDTTIDRKRYTSTKEVLDATLIHQSITGLYETRIDLSQLGGDAPAPAPAPAPAPAPAPAPAPAPAMVSKGEEDNMAIIKEFMRFKVHMEGSVNGHEFEIEGEGEGRPYEGTQTAKLKVTKGGPLPFAWDILSPQFMYGSKAYVKHPADIPDYLKLSFPEGFKWERVMNFEDGGVVTVTQDSSLQDGEFIYKVKLRGTNFPSDGPVMQKKTMGWEASSERMYPEDGALKGEIKQRLKLKDGGHYDAEVKTTYKAKKPVQLPGAYNVNIKLDITSHNEDYTIVEQYERAEGRHSTGGMDELYK

SEQ ID NO: 88 - protein, 1629 aa, synthetic construct
  REGION 1..1629: note = SYNTHETIC
MDKKYSIGLDIGTNSVGWAVITDEYKVPSKKFKVLGNTDRHSIKKNLIGALLFDSGETAEATRLKRTARRRYTRRKNRICYLQEIFSNEMAKVDDSFFHRLEESFLVEEDKKHERHPIFGNIVDEVAYHEKYPTIYHLRKKLVDSTDKADLRLIYLALAHMIKFRGHFLIEGDLNPDNSDVDKLFIQLVQTYNQLFEENPINASGVDAKAILSARLSKSRRLENLIAQLPGEKKNGLFGNLIALSLGLTPNFKSNFDLAEDAKLQLSKDTYDDDLDNLLAQIGDQYADLFLAAKNLSDAILLSDILRVNTEITKAPLSASMIKRYDEHHQDLTLLKALVRQQLPEKYKEIFFDQSKNGYAGYIDGGASQEEFYKFIKPILEKMDGTEELLVKLNREDLLRKQRTFDNGSIPHQIHLGELHAILRRQEDFYPFLKDNREKIEKILTFRIPYYVGPLARGNSRFAWMTRKSEETITPWNFEEVVDKGASAQSFIERMTNFDKNLPNEKVLPKHSLLYEYFTVYNELTKVKYVTEGMRKPAFLSGEQKKAIVDLLFKTNRKVTVKQLKEDYFKKIECFDSVEISGVEDRFNASLGTYHDLLKIIKDKDFLDNEENEDILEDIVLTLTLFEDREMIEERLKTYAHLFDDKVMKQLKRRRYTGWGRLSRKLINGIRDKQSGKTILDFLKSDGFANRNFMQLIHDDSLTFKEDIQKAQVSGQGDSLHEHIANLAGSPAIKKGILQTVKVVDELVKVMGRHKPENIVIEMARENQTTQKGQKNSRERMKRIEEGIKELGSQILKEHPVENTQLQNEKLYLYYLQNGRDMYVDQELDINRLSDYDVDHIVPQSFLKDDSIDNKVLTRSDKNRGKSDNVPSEEVVKKMKNYWRQLLNAKLITQRKFDNLTKAERGGLSELDKAGFIKRQLVETRQITKHVAQILDSRMNTKYDENDKLIREVKVITLKSKLVSDFRKDFQFYKVREINNYHHAHDAYLNAVVGTALIKKYPKLESEFVYGDYKVYDVRKMIAKSEQEIGKATAKYFFYSNIMNFFKTEITLANGEIRKRPLIETNGETGEIVWDKGRDFATVRKVLSMPQVNIVKKTEVQTGGFSKESILPKRNSDKLIARKKDWDPKKYGGFDSPTVAYSVLVVAKVEKGKSKKLKSVKELLGITIMERSSFEKNPIDFLEAKGYKEVKKDLIIKLPKYSLFELENGRKRMLASAGELQKGNELALPSKYVNFLYLASHYEKLKGSPEDNEQKQLFVEQHKHYLDEIIEQISEFSKRVILADANLDKVLSAYNKHRDKPIREQAENIIHLFTLTNLGAPAAFKYFDTTIDRKRYTSTKEVLDATLIHQSITGLYETRIDLSQLGGDAPAPAPAPAPAPAPAPAPAPAPAPAMVSKGEEDNMAIIKEFMRFKVHMEGSVNGHEFEIEGEGEGRPYEGTQTAKLKVTKGGPLPFAWDILSPQFMYGSKAYVKHPADIPDYLKLSFPEGFKWERVMNFEDGGVVTVTQDSSLQDGEFIYKVKLRGTNFPSDGPVMQKKTMGWEASSERMYPEDGALKGEIKQRLKLKDGGHYDAEVKTTYKAKKPVQLPGAYNVNIKLDITSHNEDYTIVEQYERAEGRHSTGGMDELYK

SEQ ID NO: 89 - protein, 1631 aa, synthetic construct
  REGION 1..1631: note = SYNTHETIC
MDKKYSIGLDIGTNSVGWAVITDEYKVPSKKFKVLGNTDRHSIKKNLIGALLFDSGETAEATRLKRTARRRYTRRKNRICYLQEIFSNEMAKVDDSFFHRLEESFLVEEDKKHERHPIFGNIVDEVAYHEKYPTIYHLRKKLVDSTDKADLRLIYLALAHMIKFRGHFLIEGDLNPDNSDVDKLFIQLVQTYNQLFEENPINASGVDAKAILSARLSKSRRLENLIAQLPGEKKNGLFGNLIALSLGLTPNFKSNFDLAEDAKLQLSKDTYDDDLDNLLAQIGDQYADLFLAAKNLSDAILLSDILRVNTEITKAPLSASMIKRYDEHHQDLTLLKALVRQQLPEKYKEIFFDQSKNGYAGYIDGGASQEEFYKFIKPILEKMDGTEELLVKLNREDLLRKQRTFDNGSIPHQIHLGELHAILRRQEDFYPFLKDNREKIEKILTFRIPYYVGPLARGNSRFAWMTRKSEETITPWNFEEVVDKGASAQSFIERMTNFDKNLPNEKVLPKHSLLYEYFTVYNELTKVKYVTEGMRKPAFLSGEQKKAIVDLLFKTNRKVTVKQLKEDYFKKIECFDSVEISGVEDRFNASLGTYHDLLKIIKDKDFLDNEENEDILEDIVLTLTLFEDREMIEERLKTYAHLFDDKVMKQLKRRRYTGWGRLSRKLINGIRDKQSGKTILDFLKSDGFANRNFMQLIHDDSLTFKEDIQKAQVSGQGDSLHEHIANLAGSPAIKKGILQTVKVVDELVKVMGRHKPENIVIEMARENQTTQKGQKNSRERMKRIEEGIKELGSQILKEHPVENTQLQNEKLYLYYLQNGRDMYVDQELDINRLSDYDVDHIVPQSFLKDDSIDNKVLTRSDKNRGKSDNVPSEEVVKKMKNYWRQLLNAKLITQRKFDNLTKAERGGLSELDKAGFIKRQLVETRQITKHVAQILDSRMNTKYDENDKLIREVKVITLKSKLVSDFRKDFQFYKVREINNYHHAHDAYLNAVVGTALIKKYPKLESEFVYGDYKVYDVRKMIAKSEQEIGKATAKYFFYSNIMNFFKTEITLANGEIRKRPLIETNGETGEIVWDKGRDFATVRKVLSMPQVNIVKKTEVQTGGFSKESILPKRNSDKLIARKKDWDPKKYGGFDSPTVAYSVLVVAKVEKGKSKKLKSVKELLGITIMERSSFEKNPIDFLEAKGYKEVKKDLIIKLPKYSLFELENGRKRMLASAGELQKGNELALPSKYVNFLYLASHYEKLKGSPEDNEQKQLFVEQHKHYLDEIIEQISEFSKRVILADANLDKVLSAYNKHRDKPIREQAENIIHLFTLTNLGAPAAFKYFDTTIDRKRYTSTKEVLDATLIHQSITGLYETRIDLSQLGGDAPAPAPAPAPAPAPAPAPAPAPAPAPAMVSKGEEDNMAIIKEFMRFKVHMEGSVNGHEFEIEGEGEGRPYEGTQTAKLKVTKGGPLPFAWDILSPQFMYGSKAYVKHPADIPDYLKLSFPEGFKWERVMNFEDGGVVTVTQDSSLQDGEFIYKVKLRGTNFPSDGPVMQKKTMGWEASSERMYPEDGALKGEIKQRLKLKDGGHYDAEVKTTYKAKKPVQLPGAYNVNIKLDITSHNEDYTIVEQYERAEGRHSTGGMDELYK

SEQ ID NO: 90 - protein, 1633 aa, synthetic construct
  REGION 1..1633: note = SYNTHETIC
MDKKYSIGLDIGTNSVGWAVITDEYKVPSKKFKVLGNTDRHSIKKNLIGALLFDSGETAEATRLKRTARRRYTRRKNRICYLQEIFSNEMAKVDDSFFHRLEESFLVEEDKKHERHPIFGNIVDEVAYHEKYPTIYHLRKKLVDSTDKADLRLIYLALAHMIKFRGHFLIEGDLNPDNSDVDKLFIQLVQTYNQLFEENPINASGVDAKAILSARLSKSRRLENLIAQLPGEKKNGLFGNLIALSLGLTPNFKSNFDLAEDAKLQLSKDTYDDDLDNLLAQIGDQYADLFLAAKNLSDAILLSDILRVNTEITKAPLSASMIKRYDEHHQDLTLLKALVRQQLPEKYKEIFFDQSKNGYAGYIDGGASQEEFYKFIKPILEKMDGTEELLVKLNREDLLRKQRTFDNGSIPHQIHLGELHAILRRQEDFYPFLKDNREKIEKILTFRIPYYVGPLARGNSRFAWMTRKSEETITPWNFEEVVDKGASAQSFIERMTNFDKNLPNEKVLPKHSLLYEYFTVYNELTKVKYVTEGMRKPAFLSGEQKKAIVDLLFKTNRKVTVKQLKEDYFKKIECFDSVEISGVEDRFNASLGTYHDLLKIIKDKDFLDNEENEDILEDIVLTLTLFEDREMIEERLKTYAHLFDDKVMKQLKRRRYTGWGRLSRKLINGIRDKQSGKTILDFLKSDGFANRNFMQLIHDDSLTFKEDIQKAQVSGQGDSLHEHIANLAGSPAIKKGILQTVKVVDELVKVMGRHKPENIVIEMARENQTTQKGQKNSRERMKRIEEGIKELGSQILKEHPVENTQLQNEKLYLYYLQNGRDMYVDQELDINRLSDYDVDHIVPQSFLKDDSIDNKVLTRSDKNRGKSDNVPSEEVVKKMKNYWRQLLNAKLITQRKFDNLTKAERGGLSELDKAGFIKRQLVETRQITKHVAQILDSRMNTKYDENDKLIREVKVITLKSKLVSDFRKDFQFYKVREINNYHHAHDAYLNAVVGTALIKKYPKLESEFVYGDYKVYDVRKMIAKSEQEIGKATAKYFFYSNIMNFFKTEITLANGEIRKRPLIETNGETGEIVWDKGRDFATVRKVLSMPQVNIVKKTEVQTGGFSKESILPKRNSDKLIARKKDWDPKKYGGFDSPTVAYSVLVVAKVEKGKSKKLKSVKELLGITIMERSSFEKNPIDFLEAKGYKEVKKDLIIKLPKYSLFELENGRKRMLASAGELQKGNELALPSKYVNFLYLASHYEKLKGSPEDNEQKQLFVEQHKHYLDEIIEQISEFSKRVILADANLDKVLSAYNKHRDKPIREQAENIIHLFTLTNLGAPAAFKYFDTTIDRKRYTSTKEVLDATLIHQSITGLYETRIDLSQLGGDAPAPAPAPAPAPAPAPAPAPAPAPAPAPAMVSKGEEDNMAIIKEFMRFKVHMEGSVNGHEFEIEGEGEGRPYEGTQTAKLKVTKGGPLPFAWDILSPQFMYGSKAYVKHPADIPDYLKLSFPEGFKWERVMNFEDGGVVTVTQDSSLQDGEFIYKVKLRGTNFPSDGPVMQKKTMGWEASSERMYPEDGALKGEIKQRLKLKDGGHYDAEVKTTYKAKKPVQLPGAYNVNIKLDITSHNEDYTIVEQYERAEGRHSTGGMDELYK

SEQ ID NO: 91 - protein, 1606 aa, synthetic construct
  REGION 1..1606: note = SYNTHETIC
  VARIANT 1369: note = X can be any naturally occurring amino acid
MDKKYSIGLDIGTNSVGWAVITDEYKVPSKKFKVLGNTDRHSIKKNLIGALLFDSGETAEATRLKRTARRRYTRRKNRICYLQEIFSNEMAKVDDSFFHRLEESFLVEEDKKHERHPIFGNIVDEVAYHEKYPTIYHLRKKLVDSTDKADLRLIYLALAHMIKFRGHFLIEGDLNPDNSDVDKLFIQLVQTYNQLFEENPINASGVDAKAILSARLSKSRRLENLIAQLPGEKKNGLFGNLIALSLGLTPNFKSNFDLAEDAKLQLSKDTYDDDLDNLLAQIGDQYADLFLAAKNLSDAILLSDILRVNTEITKAPLSASMIKRYDEHHQDLTLLKALVRQQLPEKYKEIFFDQSKNGYAGYIDGGASQEEFYKFIKPILEKMDGTEELLVKLNREDLLRKQRTFDNGSIPHQIHLGELHAILRRQEDFYPFLKDNREKIEKILTFRIPYYVGPLARGNSRFAWMTRKSEETITPWNFEEVVDKGASAQSFIERMTNFDKNLPNEKVLPKHSLLYEYFTVYNELTKVKYVTEGMRKPAFLSGEQKKAIVDLLFKTNRKVTVKQLKEDYFKKIECFDSVEISGVEDRFNASLGTYHDLLKIIKDKDFLDNEENEDILEDIVLTLTLFEDREMIEERLKTYAHLFDDKVMKQLKRRRYTGWGRLSRKLINGIRDKQSGKTILDFLKSDGFANRNFMQLIHDDSLTFKEDIQKAQVSGQGDSLHEHIANLAGSPAIKKGILQTVKVVDELVKVMGRHKPENIVIEMARENQTTQKGQKNSRERMKRIEEGIKELGSQILKEHPVENTQLQNEKLYLYYLQNGRDMYVDQELDINRLSDYDVDHIVPQSFLKDDSIDNKVLTRSDKNRGKSDNVPSEEVVKKMKNYWRQLLNAKLITQRKFDNLTKAERGGLSELDKAGFIKRQLVETRQITKHVAQILDSRMNTKYDENDKLIREVKVITLKSKLVSDFRKDFQFYKVREINNYHHAHDAYLNAVVGTALIKKYPKLESEFVYGDYKVYDVRKMIAKSEQEIGKATAKYFFYSNIMNFFKTEITLANGEIRKRPLIETNGETGEIVWDKGRDFATVRKVLSMPQVNIVKKTEVQTGGFSKESILPKRNSDKLIARKKDWDPKKYGGFDSPTVAYSVLVVAKVEKGKSKKLKSVKELLGITIMERSSFEKNPIDFLEAKGYKEVKKDLIIKLPKYSLFELENGRKRMLASAGELQKGNELALPSKYVNFLYLASHYEKLKGSPEDNEQKQLFVEQHKHYLDEIIEQISEFSKRVILADANLDKVLSAYNKHRDKPIREQAENIIHLFTLTNLGAPAAFKYFDTTIDRKRYTSTKEVLDATLIHQSITGLYETRIDLSQLGGDXPMVSKGEEDNMAIIKEFMRFKVHMEGSVNGHEFEIEGEGEGRPYEGTQTAKLKVTKGGPLPFAWDILSPQFMYGSKAYVKHPADIPDYLKLSFPEGFKWERVMNFEDGGVVTVTQDSSLQDGEFIYKVKLRGTNFPSDGPVMQKKTMGWEASSERMYPEDGALKGEIKQRLKLKDGGHYDAEVKTTYKAKKPVQLPGAYNVNIKLDITSHNEDYTIVEQYERAEGRHSTGGMDELYK

SEQ ID NO: 92 - protein, 1608 aa, synthetic construct
  REGION 1..1608: note = SYNTHETIC
  VARIANT 1369: note = X can be any naturally occurring amino acid
  VARIANT 1371: note = X can be any naturally occurring amino acid
MDKKYSIGLDIGTNSVGWAVITDEYKVPSKKFKVLGNTDRHSIKKNLIGALLFDSGETAEATRLKRTARRRYTRRKNRICYLQEIFSNEMAKVDDSFFHRLEESFLVEEDKKHERHPIFGNIVDEVAYHEKYPTIYHLRKKLVDSTDKADLRLIYLALAHMIKFRGHFLIEGDLNPDNSDVDKLFIQLVQTYNQLFEENPINASGVDAKAILSARLSKSRRLENLIAQLPGEKKNGLFGNLIALSLGLTPNFKSNFDLAEDAKLQLSKDTYDDDLDNLLAQIGDQYADLFLAAKNLSDAILLSDILRVNTEITKAPLSASMIKRYDEHHQDLTLLKALVRQQLPEKYKEIFFDQSKNGYAGYIDGGASQEEFYKFIKPILEKMDGTEELLVKLNREDLLRKQRTFDNGSIPHQIHLGELHAILRRQEDFYPFLKDNREKIEKILTFRIPYYVGPLARGNSRFAWMTRKSEETITPWNFEEVVDKGASAQSFIERMTNFDKNLPNEKVLPKHSLLYEYFTVYNELTKVKYVTEGMRKPAFLSGEQKKAIVDLLFKTNRKVTVKQLKEDYFKKIECFDSVEISGVEDRFNASLGTYHDLLKIIKDKDFLDNEENEDILEDIVLTLTLFEDREMIEERLKTYAHLFDDKVMKQLKRRRYTGWGRLSRKLINGIRDKQSGKTILDFLKSDGFANRNFMQLIHDDSLTFKEDIQKAQVSGQGDSLHEHIANLAGSPAIKKGILQTVKVVDELVKVMGRHKPENIVIEMARENQTTQKGQKNSRERMKRIEEGIKELGSQILKEHPVENTQLQNEKLYLYYLQNGRDMYVDQELDINRLSDYDVDHIVPQSFLKDDSIDNKVLTRSDKNRGKSDNVPSEEVVKKMKNYWRQLLNAKLITQRKFDNLTKAERGGLSELDKAGFIKRQLVETRQITKHVAQILDSRMNTKYDENDKLIREVKVITLKSKLVSDFRKDFQFYKVREINNYHHAHDAYLNAVVGTALIKKYPKLESEFVYGDYKVYDVRKMIAKSEQEIGKATAKYFFYSNIMNFFKTEITLANGEIRKRPLIETNGETGEIVWDKGRDFATVRKVLSMPQVNIVKKTEVQTGGFSKESILPKRNSDKLIARKKDWDPKKYGGFDSPTVAYSVLVVAKVEKGKSKKLKSVKELLGITIMERSSFEKNPIDFLEAKGYKEVKKDLIIKLPKYSLFELENGRKRMLASAGELQKGNELALPSKYVNFLYLASHYEKLKGSPEDNEQKQLFVEQHKHYLDEIIEQISEFSKRVILADANLDKVLSAYNKHRDKPIREQAENIIHLFTLTNLGAPAAFKYFDTTIDRKRYTSTKEVLDATLIHQSITGLYETRIDLSQLGGDXPXPMVSKGEEDNMAIIKEFMRFKVHMEGSVNGHEFEIEGEGEGRPYEGTQTAKLKVTKGGPLPFAWDILSPQFMYGSKAYVKHPADIPDYLKLSFPEGFKWERVMNFEDGGVVTVTQDSSLQDGEFIYKVKLRGTNFPSDGPVMQKKTMGWEASSERMYPEDGALKGEIKQRLKLKDGGHYDAEVKTTYKAKKPVQLPGAYNVNIKLDITSHNEDYTIVEQYERAEGRHSTGGMDELYK

SEQ ID NO: 93 - protein, 1610 aa, synthetic construct
  REGION 1..1610: note = SYNTHETIC
  VARIANT 1369: note = X can be any naturally occurring amino acid
  VARIANT 1371: note = X can be any naturally occurring amino acid
  VARIANT 1373: note = X can be any naturally occurring amino acid
MDKKYSIGLDIGTNSVGWAVITDEYKVPSKKFKVLGNTDRHSIKKNLIGALLFDSGETAEATRLKRTARRRYTRRKNRICYLQEIFSNEMAKVDDSFFHRLEESFLVEEDKKHERHPIFGNIVDEVAYHEKYPTIYHLRKKLVDSTDKADLRLIYLALAHMIKFRGHFLIEGDLNPDNSDVDKLFIQLVQTYNQLFEENPINASGVDAKAILSARLSKSRRLENLIAQLPGEKKNGLFGNLIALSLGLTPNFKSNFDLAEDAKLQLSKDTYDDDLDNLLAQIGDQYADLFLAAKNLSDAILLSDILRVNTEITKAPLSASMIKRYDEHHQDLTLLKALVRQQLPEKYKEIFFDQSKNGYAGYIDGGASQEEFYKFIKPILEKMDGTEELLVKLNREDLLRKQRTFDNGSIPHQIHLGELHAILRRQEDFYPFLKDNREKIEKILTFRIPYYVGPLARGNSRFAWMTRKSEETITPWNFEEVVDKGASAQSFIERMTNFDKNLPNEKVLPKHSLLYEYFTVYNELTKVKYVTEGMRKPAFLSGEQKKAIVDLLFKTNRKVTVKQLKEDYFKKIECFDSVEISGVEDRFNASLGTYHDLLKIIKDKDFLDNEENEDILEDIVLTLTLFEDREMIEERLKTYAHLFDDKVMKQLKRRRYTGWGRLSRKLINGIRDKQSGKTILDFLKSDGFANRNFMQLIHDDSLTFKEDIQKAQVSGQGDSLHEHIANLAGSPAIKKGILQTVKVVDELVKVMGRHKPENIVIEMARENQTTQKGQKNSRERMKRIEEGIKELGSQILKEHPVENTQLQNEKLYLYYLQNGRDMYVDQELDINRLSDYDVDHIVPQSFLKDDSIDNKVLTRSDKNRGKSDNVPSEEVVKKMKNYWRQLLNAKLITQRKFDNLTKAERGGLSELDKAGFIKRQLVETRQITKHVAQILDSRMNTKYDENDKLIREVKVITLKSKLVSDFRKDFQFYKVREINNYHHAHDAYLNAVVGTALIKKYPKLESEFVYGDYKVYDVRKMIAKSEQEIGKATAKYFFYSNIMNFFKTEITLANGEIRKRPLIETNGETGEIVWDKGRDFATVRKVLSMPQVNIVKKTEVQTGGFSKESILPKRNSDKLIARKKDWDPKKYGGFDSPTVAYSVLVVAKVEKGKSKKLKSVKELLGITIMERSSFEKNPIDFLEAKGYKEVKKDLIIKLPKYSLFELENGRKRMLASAGELQKGNELALPSKYVNFLYLASHYEKLKGSPEDNEQKQLFVEQHKHYLDEIIEQISEFSKRVILADANLDKVLSAYNKHRDKPIREQAENIIHLFTLTNLGAPAAFKYFDTTIDRKRYTSTKEVLDATLIHQSITGLYETRIDLSQLGGDXPXPXPMVSKGEEDNMAIIKEFMRFKVHMEGSVNGHEFEIEGEGEGRPYEGTQTAKLKVTKGGPLPFAWDILSPQFMYGSKAYVKHPADIPDYLKLSFPEGFKWERVMNFEDGGVVTVTQDSSLQDGEFIYKVKLRGTNFPSDGPVMQKKTMGWEASSERMYPEDGALKGEIKQRLKLKDGGHYDAEVKTTYKAKKPVQLPGAYNVNIKLDITSHNEDYTIVEQYERAEGRHSTGGMDELYK

SEQ ID NO: 94 - protein, 1612 aa, synthetic construct
  REGION 1..1612: note = SYNTHETIC
  VARIANT 1369: note = X can be any naturally occurring amino acid
  VARIANT 1371: note = X can be any naturally occurring amino acid
  VARIANT 1373: note = X can be any naturally occurring amino acid
  VARIANT 1375: note = X can be any naturally occurring amino acid
MDKKYSIGLDIGTNSVGWAVITDEYKVPSKKFKVLGNTDRHSIKKNLIGALLFDSGETAEATRLKRTARRRYTRRKNRICYLQEIFSNEMAKVDDSFFHRLEESFLVEEDKKHERHPIFGNIVDEVAYHEKYPTIYHLRKKLVDSTDKADLRLIYLALAHMIKFRGHFLIEGDLNPDNSDVDKLFIQLVQTYNQLFEENPINASGVDAKAILSARLSKSRRLENLIAQLPGEKKNGLFGNLIALSLGLTPNFKSNFDLAEDAKLQLSKDTYDDDLDNLLAQIGDQYADLFLAAKNLSDAILLSDILRVNTEITKAPLSASMIKRYDEHHQDLTLLKALVRQQLPEKYKEIFFDQSKNGYAGYIDGGASQEEFYKFIKPILEKMDGTEELLVKLNREDLLRKQRTFDNGSIPHQIHLGELHAILRRQEDFYPFLKDNREKIEKILTFRIPYYVGPLARGNSRFAWMTRKSEETITPWNFEEVVDKGASAQSFIERMTNFDKNLPNEKVLPKHSLLYEYFTVYNELTKVKYVTEGMRKPAFLSGEQKKAIVDLLFKTNRKVTVKQLKEDYFKKIECFDSVEISGVEDRFNASLGTYHDLLKIIKDKDFLDNEENEDILEDIVLTLTLFEDREMIEERLKTYAHLFDDKVMKQLKRRRYTGWGRLSRKLINGIRDKQSGKTILDFLKSDGFANRNFMQLIHDDSLTFKEDIQKAQVSGQGDSLHEHIANLAGSPAIKKGILQTVKVVDELVKVMGRHKPENIVIEMARENQTTQKGQKNSRERMKRIEEGIKELGSQILKEHPVENTQLQNEKLYLYYLQNGRDMYVDQELDINRLSDYDVDHIVPQSFLKDDSIDNKVLTRSDKNRGKSDNVPSEEVVKKMKNYWRQLLNAKLITQRKFDNLTKAERGGLSELDKAGFIKRQLVETRQITKHVAQILDSRMNTKYDENDKLIREVKVITLKSKLVSDFRKDFQFYKVREINNYHHAHDAYLNAVVGTALIKKYPKLESEFVYGDYKVYDVRKMIAKSEQEIGKATAKYFFYSNIMNFFKTEITLANGEIRKRPLIETNGETGEIVWDKGRDFATVRKVLSMPQVNIVKKTEVQTGGFSKESILPKRNSDKLIARKKDWDPKKYGGFDSPTVAYSVLVVAKVEKGKSKKLKSVKELLGITIMERSSFEKNPIDFLEAKGYKEVKKDLIIKLPKYSLFELENGRKRMLASAGELQKGNELALPSKYVNFLYLASHYEKLKGSPEDNEQKQLFVEQHKHYLDEIIEQISEFSKRVILADANLDKVLSAYNKHRDKPIREQAENIIHLFTLTNLGAPAAFKYFDTTIDRKRYTSTKEVLDATLIHQSITGLYETRIDLSQLGGDXPXPXPXPMVSKGEEDNMAIIKEFMRFKVHMEGSVNGHEFEIEGEGEGRPYEGTQTAKLKVTKGGPLPFAWDILSPQFMYGSKAYVKHPADIPDYLKLSFPEGFKWERVMNFEDGGVVTVTQDSSLQDGEFIYKVKLRGTNFPSDGPVMQKKTMGWEASSERMYPEDGALKGEIKQRLKLKDGGHYDAEVKTTYKAKKPVQLPGAYNVNIKLDITSHNEDYTIVEQYERAEGRHSTGGMDELYK

SEQ ID NO: 95 - protein, 1614 aa, synthetic construct
  REGION 1..1614: note = SYNTHETIC
  VARIANT 1369: note = X can be any naturally occurring amino acid
  VARIANT 1371: note = X can be any naturally occurring amino acid
  VARIANT 1373: note = X can be any naturally occurring amino acid
  VARIANT 1375: note = X can be any naturally occurring amino acid
  VARIANT 1377: note = X can be any naturally occurring amino acid
MDKKYSIGLDIGTNSVGWAVITDEYKVPSKKFKVLGNTDRHSIKKNLIGALLFDSGETAEATRLKRTARRRYTRRKNRICYLQEIFSNEMAKVDDSFFHRLEESFLVEEDKKHERHPIFGNIVDEVAYHEKYPTIYHLRKKLVDSTDKADLRLIYLALAHMIKFRGHFLIEGDLNPDNSDVDKLFIQLVQTYNQLFEENPINASGVDAKAILSARLSKSRRLENLIAQLPGEKKNGLFGNLIALSLGLTPNFKSNFDLAEDAKLQLSKDTYDDDLDNLLAQIGDQYADLFLAAKNLSDAILLSDILRVNTEITKAPLSASMIKRYDEHHQDLTLLKALVRQQLPEKYKEIFFDQSKNGYAGYIDGGASQEEFYKFIKPILEKMDGTEELLVKLNREDLLRKQRTFDNGSIPHQIHLGELHAILRRQEDFYPFLKDNREKIEKILTFRIPYYVGPLARGNSRFAWMTRKSEETITPWNFEEVVDKGASAQSFIERMTNFDKNLPNEKVLPKHSLLYEYFTVYNELTKVKYVTEGMRKPAFLSGEQKKAIVDLLFKTNRKVTVKQLKEDYFKKIECFDSVEISGVEDRFNASLGTYHDLLKIIKDKDFLDNEENEDILEDIVLTLTLFEDREMIEERLKTYAHLFDDKVMKQLKRRRYTGWGRLSRKLINGIRDKQSGKTILDFLKSDGFANRNFMQLIHDDSLTFKEDIQKAQVSGQGDSLHEHIANLAGSPAIKKGILQTVKVVDELVKVMGRHKPENIVIEMARENQTTQKGQKNSRERMKRIEEGIKELGSQILKEHPVENTQLQNEKLYLYYLQNGRDMYVDQELDINRLSDYDVDHIVPQSFLKDDSIDNKVLTRSDKNRGKSDNVPSEEVVKKMKNYWRQLLNAKLITQRKFDNLTKAERGGLSELDKAGFIKRQLVETRQITKHVAQILDSRMNTKYDENDKLIREVKVITLKSKLVSDFRKDFQFYKVREINNYHHAHDAYLNAVVGTALIKKYPKLESEFVYGDYKVYDVRKMIAKSEQEIGKATAKYFFYSNIMNFFKTEITLANGEIRKRPLIETNGETGEIVWDKGRDFATVRKVLSMPQVNIVKKTEVQTGGFSKESILPKRNSDKLIARKKDWDPKKYGGFDSPTVAYSVLVVAKVEKGKSKKLKSVKELLGITIMERSSFEKNPIDFLEAKGYKEVKKDLIIKLPKYSLFELENGRKRMLASAGELQKGNELALPSKYVNFLYLASHYEKLKGSPEDNEQKQLFVEQHKHYLDEIIEQISEFSKRVILADANLDKVLSAYNKHRDKPIREQAENIIHLFTLTNLGAPAAFKYFDTTIDRKRYTSTKEVLDATLIHQSITGLYETRIDLSQLGGDXPXPXPXPXPMVSKGEEDNMAIIKEFMRFKVHMEGSVNGHEFEIEGEGEGRPYEGTQTAKLKVTKGGPLPFAWDILSPQFMYGSKAYVKHPADIPDYLKLSFPEGFKWERVMNFEDGGVVTVTQDSSLQDGEFIYKVKLRGTNFPSDGPVMQKKTMGWEASSERMYPEDGALKGEIKQRLKLKDGGHYDAEVKTTYKAKKPVQLPGAYNVNIKLDITSHNEDYTIVEQYERAEGRHSTGGMDELYK

SEQ ID NO: 96 - protein, 1616 aa, synthetic construct
  REGION 1..1616: note = SYNTHETIC
  VARIANT 1369: note = X can be any naturally occurring amino acid
  VARIANT 1371: note = X can be any naturally occurring amino acid
  VARIANT 1373: note = X can be any naturally occurring amino acid
  VARIANT 1375: note = X can be any naturally occurring amino acid
  VARIANT 1377: note = X can be any naturally occurring amino acid
  VARIANT 1379: note = X can be any naturally occurring amino acid
MDKKYSIGLDIGTNSVGWAVITDEYKVPSKKFKVLGNTDRHSIKKNLIGALLFDSGETAEATRLKRTARRRYTRRKNRICYLQEIFSNEMAKVDDSFFHRLEESFLVEEDKKHERHPIFGNIVDEVAYHEKYPTIYHLRKKLVDSTDKADLRLIYLALAHMIKFRGHFLIEGDLNPDNSDVDKLFIQLVQTYNQLFEENPINASGVDAKAILSARLSKSRRLENLIAQLPGEKKNGLFGNLIALSLGLTPNFKSNFDLAEDAKLQLSKDTYDDDLDNLLAQIGDQYADLFLAAKNLSDAILLSDILRVNTEITKAPLSASMIKRYDEHHQDLTLLKALVRQQLPEKYKEIFFDQSKNGYAGYIDGGASQEEFYKFIKPILEKMDGTEELLVKLNREDLLRKQRTFDNGSIPHQIHLGELHAILRRQEDFYPFLKDNREKIEKILTFRIPYYVGPLARGNSRFAWMTRKSEETITPWNFEEVVDKGASAQSFIERMTNFDKNLPNEKVLPKHSLLYEYFTVYNELTKVKYVTEGMRKPAFLSGEQKKAIVDLLFKTNRKVTVKQLKEDYFKKIECFDSVEISGVEDRFNASLGTYHDLLKIIKDKDFLDNEENEDILEDIVLTLTLFEDREMIEERLKTYAHLFDDKVMKQLKRRRYTGWGRLSRKLINGIRDKQSGKTILDFLKSDGFANRNFMQLIHDDSLTFKEDIQKAQVSGQGDSLHEHIANLAGSPAIKKGILQTVKVVDELVKVMGRHKPENIVIEMARENQTTQKGQKNSRERMKRIEEGIKELGSQILKEHPVENTQLQNEKLYLYYLQNGRDMYVDQELDINRLSDYDVDHIVPQSFLKDDSIDNKVLTRSDKNRGKSDNVPSEEVVKKMKNYWRQLLNAKLITQRKFDNLTKAERGGLSELDKAGFIKRQLVETRQITKHVAQILDSRMNTKYDENDKLIREVKVITLKSKLVSDFRKDFQFYKVREINNYHHAHDAYLNAVVGTALIKKYPKLESEFVYGDYKVYDVRKMIAKSEQEIGKATAKYFFYSNIMNFFKTEITLANGEIRKRPLIETNGETGEIVWDKGRDFATVRKVLSMPQVNIVKKTEVQTGGFSKESILPKRNSDKLIARKKDWDPKKYGGFDSPTVAYSVLVVAKVEKGKSKKLKSVKELLGITIMERSSFEKNPIDFLEAKGYKEVKKDLIIKLPKYSLFELENGRKRMLASAGELQKGNELALPSKYVNFLYLASHYEKLKGSPEDNEQKQLFVEQHKHYLDEIIEQISEFSKRVILADANLDKVLSAYNKHRDKPIREQAENIIHLFTLTNLGAPAAFKYFDTTIDRKRYTSTKEVLDATLIHQSITGLYETRIDLSQLGGDXPXPXPXPXPXPMVSKGEEDNMAIIKEFMRFKVHMEGSVNGHEFEIEGEGEGRPYEGTQTAKLKVTKGGPLPFAWDILSPQFMYGSKAYVKHPADIPDYLKLSFPEGFKWERVMNFEDGGVVTVTQDSSLQDGEFIYKVKLRGTNFPSDGPVMQKKTMGWEASSERMYPEDGALKGEIKQRLKLKDGGHYDAEVKTTYKAKKPVQLPGAYNVNIKLDITSHNEDYTIVEQYERAEGRHSTGGMDELYK

SEQ ID NO: 97 - protein, 1618 aa, synthetic construct
  REGION 1..1618: note = SYNTHETIC
  VARIANT 1369: note = X can be any naturally occurring amino acid
  VARIANT 1371: note = X can be any naturally occurring amino acid
  VARIANT 1373: note = X can be any naturally occurring amino acid
  VARIANT 1375: note = X can be any naturally occurring amino acid
  VARIANT 1377: note = X can be any naturally occurring amino acid
  VARIANT 1379: note = X can be any naturally occurring amino acid
  VARIANT 1381: note = X can be any naturally occurring amino acid
MDKKYSIGLDIGTNSVGWAVITDEYKVPSKKFKVLGNTDRHSIKKNLIGALLFDSGETAEATRLKRTARRRYTRRKNRICYLQEIFSNEMAKVDDSFFHRLEESFLVEEDKKHERHPIFGNIVDEVAYHEKYPTIYHLRKKLVDSTDKADLRLIYLALAHMIKFRGHFLIEGDLNPDNSDVDKLFIQLVQTYNQLFEENPINASGVDAKAILSARLSKSRRLENLIAQLPGEKKNGLFGNLIALSLGLTPNFKSNFDLAEDAKLQLSKDTYDDDLDNLLAQIGDQYADLFLAAKNLSDAILLSDILRVNTEITKAPLSASMIKRYDEHHQDLTLLKALVRQQLPEKYKEIFFDQSKNGYAGYIDGGASQEEFYKFIKPILEKMDGTEELLVKLNREDLLRKQRTFDNGSIPHQIHLGELHAILRRQEDFYPFLKDNREKIEKILTFRIPYYVGPLARGNSRFAWMTRKSEETITPWNFEEVVDKGASAQSFIERMTNFDKNLPNEKVLPKHSLLYEYFTVYNELTKVKYVTEGMRKPAFLSGEQKKAIVDLLFKTNRKVTVKQLKEDYFKKIECFDSVEISGVEDRFNASLGTYHDLLKIIKDKDFLDNEENEDILEDIVLTLTLFEDREMIEERLKTYAHLFDDKVMKQLKRRRYTGWGRLSRKLINGIRDKQSGKTILDFLKSDGFANRNFMQLIHDDSLTFKEDIQKAQVSGQGDSLHEHIANLAGSPAIKKGILQTVKVVDELVKVMGRHKPENIVIEMARENQTTQKGQKNSRERMKRIEEGIKELGSQILKEHPVENTQLQNEKLYLYYLQNGRDMYVDQELDINRLSDYDVDHIVPQSFLKDDSIDNKVLTRSDKNRGKSDNVPSEEVVKKMKNYWRQLLNAKLITQRKFDNLTKAERGGLSELDKAGFIKRQLVETRQITKHVAQILDSRMNTKYDENDKLIREVKVITLKSKLVSDFRKDFQFYKVREINNYHHAHDAYLNAVVGTALIKKYPKLESEFVYGDYKVYDVRKMIAKSEQEIGKATAKYFFYSNIMNFFKTEITLANGEIRKRPLIETNGETGEIVWDKGRDFATVRKVLSMPQVNIVKKTEVQTGGFSKESILPKRNSDKLIARKKDWDPKKYGGFDSPTVAYSVLVVAKVEKGKSKKLKSVKELLGITIMERSSFEKNPIDFLEAKGYKEVKKDLIIKLPKYSLFELENGRKRMLASAGELQKGNELALPSKYVNFLYLASHYEKLKGSPEDNEQKQLFVEQHKHYLDEIIEQISEFSKRVILADANLDKVLSAYNKHRDKPIREQAENIIHLFTLTNLGAPAAFKYFDTTIDRKRYTSTKEVLDATLIHQSITGLYETRIDLSQLGGDXPXPXPXPXPXPXPMVSKGEEDNMAIIKEFMRFKVHMEGSVNGHEFEIEGEGEGRPYEGTQTAKLKVTKGGPLPFAWDILSPQFMYGSKAYVKHPADIPDYLKLSFPEGFKWERVMNFEDGGVVTVTQDSSLQDGEFIYKVKLRGTNFPSDGPVMQKKTMGWEASSERMYPEDGALKGEIKQRLKLKDGGHYDAEVKTTYKAKKPVQLPGAYNVNIKLDITSHNEDYTIVEQYERAEGRHSTGGMDELYK

SEQ ID NO: 98 - protein, 1620 aa, synthetic construct
  REGION 1..1620: note = SYNTHETIC
  VARIANT 1369: note = X can be any naturally occurring amino acid
  VARIANT 1371: note = X can be any naturally occurring amino acid
  VARIANT 1373: note = X can be any naturally occurring amino acid
  VARIANT 1375: note = X can be any naturally occurring amino acid
  VARIANT 1377: note = X can be any naturally occurring amino acid
  VARIANT 1379: note = X can be any naturally occurring amino acid
  VARIANT 1381: note = X can be any naturally occurring amino acid
  VARIANT 1383: note = X can be any naturally occurring amino acid
MDKKYSIGLDIGTNSVGWAVITDEYKVPSKKFKVLGNTDRHSIKKNLIGALLFDSGETAEATRLKRTARRRYTRRKNRICYLQEIFSNEMAKVDDSFFHRLEESFLVEEDKKHERHPIFGNIVDEVAYHEKYPTIYHLRKKLVDSTDKADLRLIYLALAHMIKFRGHFLIEGDLNPDNSDVDKLFIQLVQTYNQLFEENPINASGVDAKAILSARLSKSRRLENLIAQLPGEKKNGLFGNLIALSLGLTPNFKSNFDLAEDAKLQLSKDTYDDDLDNLLAQIGDQYADLFLAAKNLSDAILLSDILRVNTEITKAPLSASMIKRYDEHHQDLTLLKALVRQQLPEKYKEIFFDQSKNGYAGYIDGGASQEEFYKFIKPILEKMDGTEELLVKLNREDLLRKQRTFDNGSIPHQIHLGELHAILRRQEDFYPFLKDNREKIEKILTFRIPYYVGPLARGNSRFAWMTRKSEETITPWNFEEVVDKGASAQSFIERMTNFDKNLPNEKVLPKHSLLYEYFTVYNELTKVKYVTEGMRKPAFLSGEQKKAIVDLLFKTNRKVTVKQLKEDYFKKIECFDSVEISGVEDRFNASLGTYHDLLKIIKDKDFLDNEENEDILEDIVLTLTLFEDREMIEERLKTYAHLFDDKVMKQLKRRRYTGWGRLSRKLINGIRDKQSGKTILDFLKSDGFANRNFMQLIHDDSLTFKEDIQKAQVSGQGDSLHEHIANLAGSPAIKKGILQTVKVVDELVKVMGRHKPENIVIEMARENQTTQKGQKNSRERMKRIEEGIKELGSQILKEHPVENTQLQNEKLYLYYLQNGRDMYVDQELDINRLSDYDVDHIVPQSFLKDDSIDNKVLTRSDKNRGKSDNVPSEEVVKKMKNYWRQLLNAKLITQRKFDNLTKAERGGLSELDKAGFIKRQLVETRQITKHVAQILDSRMNTKYDENDKLIREVKVITLKSKLVSDFRKDFQFYKVREINNYHHAHDAYLNAVVGTALIKKYPKLESEFVYGDYKVYDVRKMIAKSEQEIGKATAKYFFYSNIMNFFKTEITLANGEIRKRPLIETNGETGEIVWDKGRDFATVRKVLSMPQVNIVKKTEVQTGGFSKESILPKRNSDKLIARKKDWDPKKYGGFDSPTVAYSVLVVAKVEKGKSKKLKSVKELLGITIMERSSFEKNPIDFLEAKGYKEVKKDLIIKLPKYSLFELENGRKRMLASAGELQKGNELALPSKYVNFLYLASHYEKLKGSPEDNEQKQLFVEQHKHYLDEIIEQISEFSKRVILADANLDKVLSAYNKHRDKPIREQAENIIHLFTLTNLGAPAAFKYFDTTIDRKRYTSTKEVLDATLIHQSITGLYETRIDLSQLGGDXPXPXPXPXPXPXPXPMVSKGEEDNMAIIKEFMRFKVHMEGSVNGHEFEIEGEGEGRPYEGTQTAKLKVTKGGPLPFAWDILSPQFMYGSKAYVKHPADIPDYLKLSFPEGFKWERVMNFEDGGVVTVTQDSSLQDGEFIYKVKLRGTNFPSDGPVMQKKTMGWEASSERMYPEDGALKGEIKQRLKLKDGGHYDAEVKTTYKAKKPVQLPGAYNVNIKLDITSHNEDYTIVEQYERAEGRHSTGGMDELYK

SEQ ID NO: 99 - protein, 1622 aa, synthetic construct
  REGION 1..1622: note = SYNTHETIC
  VARIANT 1369: note = X can be any naturally occurring amino acid
  VARIANT 1371: note = X can be any naturally occurring amino acid
  VARIANT 1373: note = X can be any naturally occurring amino acid
  VARIANT 1375: note = X can be any naturally occurring amino acid
  VARIANT 1377: note = X can be any naturally occurring amino acid
  VARIANT 1379: note = X can be any naturally occurring amino acid
  VARIANT 1381: note = X can be any naturally occurring amino acid
  VARIANT 1383: note = X can be any naturally occurring amino acid
  VARIANT 1385: note = X can be any naturally occurring amino acid
MDKKYSIGLDIGTNSVGWAVITDEYKVPSKKFKVLGNTDRHSIKKNLIGALLFDSGETAEATRLKRTARRRYTRRKNRICYLQEIFSNEMAKVDDSFFHRLEESFLVEEDKKHERHPIFGNIVDEVAYHEKYPTIYHLRKKLVDSTDKADLRLIYLALAHMIKFRGHFLIEGDLNPDNSDVDKLFIQLVQTYNQLFEENPINASGVDAKAILSARLSKSRRLENLIAQLPGEKKNGLFGNLIALSLGLTPNFKSNFDLAEDAKLQLSKDTYDDDLDNLLAQIGDQYADLFLAAKNLSDAILLSDILRVNTEITKAPLSASMIKRYDEHHQDLTLLKALVRQQLPEKYKEIFFDQSKNGYAGYIDGGASQEEFYKFIKPILEKMDGTEELLVKLNREDLLRKQRTFDNGSIPHQIHLGELHAILRRQEDFYPFLKDNREKIEKILTFRIPYYVGPLARGNSRFAWMTRKSEETITPWNFEEVVDKGASAQSFIERMTNFDKNLPNEKVLPKHSLLYEYFTVYNELTKVKYVTEGMRKPAFLSGEQKKAIVDLLFKTNRKVTVKQLKEDYFKKIECFDSVEISGVEDRFNASLGTYHDLLKIIKDKDFLDNEENEDILEDIVLTLTLFEDREMIEERLKTYAHLFDDKVMKQLKRRRYTGWGRLSRKLINGIRDKQSGKTILDFLKSDGFANRNFMQLIHDDSLTFKEDIQKAQVSGQGDSLHEHIANLAGSPAIKKGILQTVKVVDELVKVMGRHKPENIVIEMARENQTTQKGQKNSRERMKRIEEGIKELGSQILKEHPVENTQLQNEKLYLYYLQNGRDMYVDQELDINRLSDYDVDHIVPQSFLKDDSIDNKVLTRSDKNRGKSDNVPSEEVVKKMKNYWRQLLNAKLITQRKFDNLTKAERGGLSELDKAGFIKRQLVETRQITKHVAQILDSRMNTKYDENDKLIREVKVITLKSKLVSDFRKDFQFYKVREINNYHHAHDAYLNAVVGTALIKKYPKLESEFVYGDYKVYDVRKMIAKSEQEIGKATAKYFFYSNIMNFFKTEITLANGEIRKRPLIETNGETGEIVWDKGRDFATVRKVLSMPQVNIVKKTEVQTGGFSKESILPKRNSDKLIARKKDWDPKKYGGFDSPTVAYSVLVVAKVEKGKSKKLKSVKELLGITIMERSSFEKNPIDFLEAKGYKEVKKDLIIKLPKYSLFELENGRKRMLASAGELQKGNELALPSKYVNFLYLASHYEKLKGSPEDNEQKQLFVEQHKHYLDEIIEQISEFSKRVILADANLDKVLSAYNKHRDKPIREQAENIIHLFTLTNLGAPAAFKYFDTTIDRKRYTSTKEVLDATLIHQSITGLYETRIDLSQLGGDXPXPXPXPXPXPXPXPXPMVSKGEEDNMAIIKEFMRFKVHMEGSVNGHEFEIEGEGEGRPYEGTQTAKLKVTKGGPLPFAWDILSPQFMYGSKAYVKHPADIPDYLKLSFPEGFKWERVMNFEDGGVVTVTQDSSLQDGEFIYKVKLRGTNFPSDGPVMQKKTMGWEASSERMYPEDGALKGEIKQRLKLKDGGHYDAEVKTTYKAKKPVQLPGAYNVNIKLDITSHNEDYTIVEQYERAEGRHSTGGMDELYK

SEQ ID NO: 100 - protein, 1624 aa, synthetic construct
  REGION 1..1624: note = SYNTHETIC
  VARIANT 1369: note = X can be any naturally occurring amino acid
  VARIANT 1371: note = X can be any naturally occurring amino acid
  VARIANT 1373: note = X can be any naturally occurring amino acid
  VARIANT 1375: note = X can be any naturally occurring amino acid
  VARIANT 1377: note = X can be any naturally occurring amino acid
  VARIANT 1379: note = X can be any naturally occurring amino acid
  VARIANT 1381: note = X can be any naturally occurring amino acid
  VARIANT 1383: note = X can be any naturally occurring amino acid
  VARIANT 1385: note = X can be any naturally occurring amino acid
  VARIANT 1387: note = X can be any naturally occurring amino acid
MDKKYSIGLDIGTNSVGWAVITDEYKVPSKKFKVLGNTDRHSIKKNLIGALLFDSGETAEATRLKRTARRRYTRRKNRICYLQEIFSNEMAKVDDSFFHRLEESFLVEEDKKHERHPIFGNIVDEVAYHEKYPTIYHLRKKLVDSTDKADLRLIYLALAHMIKFRGHFLIEGDLNPDNSDVDKLFIQLVQTYNQLFEENPINASGVDAKAILSARLSKSRRLENLIAQLPGEKKNGLFGNLIALSLGLTPNFKSNFDLAEDAKLQLSKDTYDDDLDNLLAQIGDQYADLFLAAKNLSDAILLSDILRVNTEITKAPLSASMIKRYDEHHQDLTLLKALVRQQLPEKYKEIFFDQSKNGYAGYIDGGASQEEFYKFIKPILEKMDGTEELLVKLNREDLLRKQRTFDNGSIPHQIHLGELHAILRRQEDFYPFLKDNREKIEKILTFRIPYYVGPLARGNSRFAWMTRKSEETITPWNFEEVVDKGASAQSFIERMTNFDKNLPNEKVLPKHSLLYEYFTVYNELTKVKYVTEGMRKPAFLSGEQKKAIVDLLFKTNRKVTVKQLKEDYFKKIECFDSVEISGVEDRFNASLGTYHDLLKIIKDKDFLDNEENEDILEDIVLTLTLFEDREMIEERLKTYAHLFDDKVMKQLKRRRYTGWGRLSRKLINGIRDKQSGKTILDFLKSDGFANRNFMQLIHDDSLTFKEDIQKAQVSGQGDSLHEHIANLAGSPAIKKGILQTVKVVDELVKVMGRHKPENIVIEMARENQTTQKGQKNSRERMKRIEEGIKELGSQILKEHPVENTQLQNEKLYLYYLQNGRDMYVDQELDINRLSDYDVDHIVPQSFLKDDSIDNKVLTRSDKNRGKSDNVPSEEVVKKMKNYWRQLLNAKLITQRKFDNLTKAERGGLSELDKAGFIKRQLVETRQITKHVAQILDSRMNTKYDENDKLIREVKVITLKSKLVSDFRKDFQFYKVREINNYHHAHDAYLNAVVGTALIKKYPKLESEFVYGDYKVYDVRKMIAKSEQEIGKATAKYFFYSNIMNFFKTEITLANGEIRKRPLIETNGETGEIVWDKGRDFATVRKVLSMPQVNIVKKTEVQTGGFSKESILPKRNSDKLIARKKDWDPKKYGGFDSPTVAYSVLVVAKVEKGKSKKLKSVKELLGITIMERSSFEKNPIDFLEAKGYKEVKKDLIIKLPKYSLFELENGRKRMLASAGELQKGNELALPSKYVNFLYLASHYEKLKGSPEDNEQKQLFVEQHKHYLDEIIEQISEFSKRVILADANLDKVLSAYNKHRDKPIREQAENIIHLFTLTNLGAPAAFKYFDTTIDRKRYTSTKEVLDATLIHQSITGLYETRIDLSQLGGDXPXPXPXPXPXPXPXPXPXPMVSKGEEDNMAIIKEFMRFKVHMEGSVNGHEFEIEGEGEGRPYEGTQTAKLKVTKGGPLPFAWDILSPQFMYGSKAYVKHPADIPDYLKLSFPEGFKWERVMNFEDGGVVTVTQDSSLQDGEFIYKVKLRGTNFPSDGPVMQKKTMGWEASSERMYPEDGALKGEIKQRLKLKDGGHYDAEVKTTYKAKKPVQLPGAYNVNIKLDITSHNEDYTIVEQYERAEGRHSTGGMDELYK

SEQ ID NO: 101 - protein, 1626 aa, synthetic construct
  REGION 1..1626: note = SYNTHETIC
  VARIANT 1369: note = X can be any naturally occurring amino acid
  VARIANT 1371: note = X can be any naturally occurring amino acid
  VARIANT 1373: note = X can be any naturally occurring amino acid
  VARIANT 1375: note = X can be any naturally occurring amino acid
  VARIANT 1377: note = X can be any naturally occurring amino acid
  VARIANT 1379: note = X can be any naturally occurring amino acid
  VARIANT 1381: note = X can be any naturally occurring amino acid
  VARIANT 1383: note = X can be any naturally occurring amino acid
  VARIANT 1385: note = X can be any naturally occurring amino acid
  VARIANT 1387: note = X can be any naturally occurring amino acid
  VARIANT 1389: note = X can be any naturally occurring amino acid
MDKKYSIGLDIGTNSVGWAVITDEYKVPSKKFKVLGNTDRHSIKKNLIGALLFDSGETAEATRLKRTARRRYTRRKNRICYLQEIFSNEMAKVDDSFFHRLEESFLVEEDKKHERHPIFGNIVDEVAYHEKYPTIYHLRKKLVDSTDKADLRLIYLALAHMIKFRGHFLIEGDLNPDNSDVDKLFIQLVQTYNQLFEENPINASGVDAKAILSARLSKSRRLENLIAQLPGEKKNGLFGNLIALSLGLTPNFKSNFDLAEDAKLQLSKDTYDDDLDNLLAQIGDQYADLFLAAKNLSDAILLSDILRVNTEITKAPLSASMIKRYDEHHQDLTLLKALVRQQLPEKYKEIFFDQSKNGYAGYIDGGASQEEFYKFIKPILEKMDGTEELLVKLNREDLLRKQRTFDNGSIPHQIHLGELHAILRRQEDFYPFLKDNREKIEKILTFRIPYYVGPLARGNSRFAWMTRKSEETITPWNFEEVVDKGASAQSFIERMTNFDKNLPNEKVLPKHSLLYEYFTVYNELTKVKYVTEGMRKPAFLSGEQKKAIVDLLFKTNRKVTVKQLKEDYFKKIECFDSVEISGVEDRFNASLGTYHDLLKIIKDKDFLDNEENEDILEDIVLTLTLFEDREMIEERLKTYAHLFDDKVMKQLKRRRYTGWGRLSRKLINGIRDKQSGKTILDFLKSDGFANRNFMQLIHDDSLTFKEDIQKAQVSGQGDSLHEHIANLAGSPAIKKGILQTVKVVDELVKVMGRHKPENIVIEMARENQTTQKGQKNSRERMKRIEEGIKELGSQILKEHPVENTQLQNEKLYLYYLQNGRDMYVDQELDINRLSDYDVDHIVPQSFLKDDSIDNKVLTRSDKNRGKSDNVPSEEVVKKMKNYWRQLLNAKLITQRKFDNLTKAERGGLSELDKAGFIKRQLVETRQITKHVAQILDSRMNTKYDENDKLIREVKVITLKSKLVSDFRKDFQFYKVREINNYHHAHDAYLNAVVGTALIKKYPKLESEFVYGDYKVYDVRKMIAKSEQEIGKATAKYFFYSNIMNFFKTEITLANGEIRKRPLIETNGETGEIVWDKGRDFATVRKVLSMPQVNIVKKTEVQTGGFSKESILPKRNSDKLIARKKDWDPKKYGGFDSPTVAYSVLVVAKVEKGKSKKLKSVKELLGITIMERSSFEKNPIDFLEAKGYKEVKKDLIIKLPKYSLFELENGRKRMLASAGELQKGNELALPSKYVNFLYLASHYEKLKGSPEDNEQKQLFVEQHKHYLDEIIEQISEFSKRVILADANLDKVLSAYNKHRDKPIREQAENIIHLFTLTNLGAPAAFKYFDTTIDRKRYTSTKEVLDATLIHQSITGLYETRIDLSQLGGDXPXPXPXPXPXPXPXPXPXPXPMVSKGEEDNMAIIKEFMRFKVHMEGSVNGHEFEIEGEGEGRPYEGTQTAKLKVTKGGPLPFAWDILSPQFMYGSKAYVKHPADIPDYLKLSFPEGFKWERVMNFEDGGVVTVTQDSSLQDGEFIYKVKLRGTNFPSDGPVMQKKTMGWEASSERMYPEDGALKGEIKQRLKLKDGGHYDAEVKTTYKAKKPVQLPGAYNVNIKLDITSHNEDYTIVEQYERAEGRHSTGGMDELYK

SEQ ID NO: 102 - protein, 1628 aa, synthetic construct
  REGION 1..1628: note = SYNTHETIC
  VARIANT 1369: note = X can be any naturally occurring amino acid
  VARIANT 1371: note = X can be any naturally occurring amino acid
  VARIANT 1373: note = X can be any naturally occurring amino acid
  VARIANT 1375: note = X can be any naturally occurring amino acid
  VARIANT 1377: note = X can be any naturally occurring amino acid
  VARIANT 1379: note = X can be any naturally occurring amino acid
  VARIANT 1381: note = X can be any naturally occurring amino acid
  VARIANT 1383: note = X can be any naturally occurring amino acid
  VARIANT 1385: note = X can be any naturally occurring amino acid
  VARIANT 1387: note = X can be any naturally occurring amino acid
  VARIANT 1389: note = X can be any naturally occurring amino acid
  VARIANT 1391: note = X can be any naturally occurring amino acid
MDKKYSIGLDIGTNSVGWAVITDEYKVPSKKFKVLGNTDRHSIKKNLIGALLFDSGETAEATRLKRTARRRYTRRKNRICYLQEIFSNEMAKVDDSFFHRLEESFLVEEDKKHERHPIFGNIVDEVAYHEKYPTIYHLRKKLVDSTDKADLRLIYLALAHMIKFRGHFLIEGDLNPDNSDVDKLFIQLVQTYNQLFEENPINASGVDAKAILSARLSKSRRLENLIAQLPGEKKNGLFGNLIALSLGLTPNFKSNFDLAEDAKLQLSKDTYDDDLDNLLAQIGDQYADLFLAAKNLSDAILLSDILRVNTEITKAPLSASMIKRYDEHHQDLTLLKALVRQQLPEKYKEIFFDQSKNGYAGYIDGGASQEEFYKFIKPILEKMDGTEELLVKLNREDLLRKQRTFDNGSIPHQIHLGELHAILRRQEDFYPFLKDNREKIEKILTFRIPYYVGPLARGNSRFAWMTRKSEETITPWNFEEVVDKGASAQSFIERMTNFDKNLPNEKVLPKHSLLYEYFTVYNELTKVKYVTEGMRKPAFLSGEQKKAIVDLLFKTNRKVTVKQLKEDYFKKIECFDSVEISGVEDRFNASLGTYHDLLKIIKDKDFLDNEENEDILEDIVLTLTLFEDREMIEERLKTYAHLFDDKVMKQLKRRRYTGWGRLSRKLINGIRDKQSGKTILDFLKSDGFANRNFMQLIHDDSLTFKEDIQKAQVSGQGDSLHEHIANLAGSPAIKKGILQTVKVVDELVKVMGRHKPENIVIEMARENQTTQKGQKNSRERMKRIEEGIKELGSQILKEHPVENTQLQNEKLYLYYLQNGRDMYVDQELDINRLSDYDVDHIVPQSFLKDDSIDNKVLTRSDKNRGKSDNVPSEEVVKKMKNYWRQLLNAKLITQRKFDNLTKAERGGLSELDKAGFIKRQLVETRQITKHVAQILDSRMNTKYDENDKLIREVKVITLKSKLVSDFRKDFQFYKVREINNYHHAHDAYLNAVVGTALIKKYPKLESEFVYGDYKVYDVRKMIAKSEQEIGKATAKYFFYSNIMNFFKTEITLANGEIRKRPLIETNGETGEIVWDKGRDFATVRKVLSMPQVNIVKKTEVQTGGFSKESILPKRNSDKLIARKKDWDPKKYGGFDSPTVAYSVLVVAKVEKGKSKKLKSVKELLGITIMERSSFEKNPIDFLEAKGYKEVKKDLIIKLPKYSLFELENGRKRMLASAGELQKGNELALPSKYVNFLYLASHYEKLKGSPEDNEQKQLFVEQHKHYLDEIIEQISEFSKRVILADANLDKVLSAYNKHRDKPIREQAENIIHLFTLTNLGAPAAFKYFDTTIDRKRYTSTKEVLDATLIHQSITGLYETRIDLSQLGGDXPXPXPXPXPXPXPXPXPXPXPXPMVSKGEEDNMAIIKEFMRFKVHMEGSVNGHEFEIEGEGEGRPYEGTQTAKLKVTKGGPLPFAWDILSPQFMYGSKAYVKHPADIPDYLKLSFPEGFKWERVMNFEDGGVVTVTQDSSLQDGEFIYKVKLRGTNFPSDGPVMQKKTMGWEASSERMYPEDGALKGEIKQRLKLKDGGHYDAEVKTTYKAKKPVQLPGAYNVNIKLDITSHNEDYTIVEQYERAEGRHSTGGMDELYK

SEQ ID NO: 103 - protein, 1630 aa, synthetic construct
  REGION 1..1630: note = SYNTHETIC
  VARIANT 1369: note = X can be any naturally occurring amino acid
  VARIANT 1371: note = X can be any naturally occurring amino acid
  VARIANT 1373: note = X can be any naturally occurring amino acid
  VARIANT 1375: note = X can be any naturally occurring amino acid
  VARIANT 1377: note = X can be any naturally occurring amino acid
  VARIANT 1379: note = X can be any naturally occurring amino acid
  VARIANT 1381: note = X can be any naturally occurring amino acid
  VARIANT 1383: note = X can be any naturally occurring amino acid
  VARIANT 1385: note = X can be any naturally occurring amino acid
  VARIANT 1387: note = X can be any naturally occurring amino acid
  VARIANT 1389: note = X can be any naturally occurring amino acid
  VARIANT 1391: note = X can be any naturally occurring amino acid
  VARIANT 1393: note = X can be any naturally occurring amino acid
MDKKYSIGLDIGTNSVGWAVITDEYKVPSKKFKVLGNTDRHSIKKNLIGALLFDSGETAEATRLKRTARRRYTRRKNRICYLQEIFSNEMAKVDDSFFHRLEESFLVEEDKKHERHPIFGNIVDEVAYHEKYPTIYHLRKKLVDSTDKADLRLIYLALAHMIKFRGHFLIEGDLNPDNSDVDKLFIQLVQTYNQLFEENPINASGVDAKAILSARLSKSRRLENLIAQLPGEKKNGLFGNLIALSLGLTPNFKSNFDLAEDAKLQLSKDTYDDDLDNLLAQIGDQYADLFLAAKNLSDAILLSDILRVNTEITKAPLSASMIKRYDEHHQDLTLLKALVRQQLPEKYKEIFFDQSKNGYAGYIDGGASQEEFYKFIKPILEKMDGTEELLVKLNREDLLRKQRTFDNGSIPHQIHLGELHAILRRQEDFYPFLKDNREKIEKILTFRIPYYVGPLARGNSRFAWMTRKSEETITPWNFEEVVDKGASAQSFIERMTNFDKNLPNEKVLPKHSLLYEYFTVYNELTKVKYVTEGMRKPAFLSGEQKKAIVDLLFKTNRKVTVKQLKEDYFKKIECFDSVEISGVEDRFNASLGTYHDLLKIIKDKDFLDNEENEDILEDIVLTLTLFEDREMIEERLKTYAHLFDDKVMKQLKRRRYTGWGRLSRKLINGIRDKQSGKTILDFLKSDGFANRNFMQLIHDDSLTFKEDIQKAQVSGQGDSLHEHIANLAGSPAIKKGILQTVKVVDELVKVMGRHKPENIVIEMARENQTTQKGQKNSRERMKRIEEGIKELGSQILKEHPVENTQLQNEKLYLYYLQNGRDMYVDQELDINRLSDYDVDHIVPQSFLKDDSIDNKVLTRSDKNRGKSDNVPSEEVVKKMKNYWRQLLNAKLITQRKFDNLTKAERGGLSELDKAGFIKRQLVETRQITKHVAQILDSRMNTKYDENDKLIREVKVITLKSKLVSDFRKDFQFYKVREINNYHHAHDAYLNAVVGTALIKKYPKLESEFVYGDYKVYDVRKMIAKSEQEIGKATAKYFFYSNIMNFFKTEITLANGEIRKRPLIETNGETGEIVWDKGRDFATVRKVLSMPQVNIVKKTEVQTGGFSKESILPKRNSDKLIARKKDWDPKKYGGFDSPTVAYSVLVVAKVEKGKSKKLKSVKELLGITIMERSSFEKNPIDFLEAKGYKEVKKDLIIKLPKYSLFELENGRKRMLASAGELQKGNELALPSKYVNFLYLASHYEKLKGSPEDNEQKQLFVEQHKHYLDEIIEQISEFSKRVILADANLDKVLSAYNKHRDKPIREQAENIIHLFTLTNLGAPAAFKYFDTTIDRKRYTSTKEVLDATLIHQSITGLYETRIDLSQLGGDXPXPXPXPXPXPXPXPXPXPXPXPXPMVSKGEEDNMAIIKEFMRFKVHMEGSVNGHEFEIEGEGEGRPYEGTQTAKLKVTKGGPLPFAWDILSPQFMYGSKAYVKHPADIPDYLKLSFPEGFKWERVMNFEDGGVVTVTQDSSLQDGEFIYKVKLRGTNFPSDGPVMQKKTMGWEASSERMYPEDGALKGEIKQRLKLKDGGHYDAEVKTTYKAKKPVQLPGAYNVNIKLDITSHNEDYTIVEQYERAEGRHSTGGMDELYK

SEQ ID NO: 104 - protein, 1632 aa, synthetic construct
  REGION 1..1632: note = SYNTHETIC
  VARIANT 1369: note = X can be any naturally occurring amino acid
  VARIANT 1371: note = X can be any naturally occurring amino acid
  VARIANT 1373: note = X can be any naturally occurring amino acid
  VARIANT 1375: note = X can be any naturally occurring amino acid
  VARIANT 1377: note = X can be any naturally occurring amino acid
  VARIANT 1379: note = X can be any naturally occurring amino acid
  VARIANT 1381: note = X can be any naturally occurring amino acid
  VARIANT 1383: note = X can be any naturally occurring amino acid
  VARIANT 1385: note = X can be any naturally occurring amino acid
  VARIANT 1387: note = X can be any naturally occurring amino acid
  VARIANT 1389: note = X can be any naturally occurring amino acid
  VARIANT 1391: note = X can be any naturally occurring amino acid
  VARIANT 1393: note = X can be any naturally occurring amino acid
  VARIANT 1395: note = X can be any naturally occurring amino acid
MDKKYSIGLDIGTNSVGWAVITDEYKVPSKKFKVLGNTDRHSIKKNLIGALLFDSGETAEATRLKRTARRRYTRRKNRICYLQEIFSNEMAKVDDSFFHRLEESFLVEEDKKHERHPIFGNIVDEVAYHEKYPTIYHLRKKLVDSTDKADLRLIYLALAHMIKFRGHFLIEGDLNPDNSDVDKLFIQLVQTYNQLFEENPINASGVDAKAILSARLSKSRRLENLIAQLPGEKKNGLFGNLIALSLGLTPNFKSNFDLAEDAKLQLSKDTYDDDLDNLLAQIGDQYADLFLAAKNLSDAILLSDILRVNTEITKAPLSASMIKRYDEHHQDLTLLKALVRQQLPEKYKEIFFDQSKNGYAGYIDGGASQEEFYKFIKPILEKMDGTEELLVKLNREDLLRKQRTFDNGSIPHQIHLGELHAILRRQEDFYPFLKDNREKIEKILTFRIPYYVGPLARGNSRFAWMTRKSEETITPWNFEEVVDKGASAQSFIERMTNFDKNLPNEKVLPKHSLLYEYFTVYNELTKVKYVTEGMRKPAFLSGEQKKAIVDLLFKTNRKVTVKQLKEDYFKKIECFDSVEISGVEDRFNASLGTYHDLLKIIKDKDFLDNEENEDILEDIVLTLTLFEDREMIEERLKTYAHLFDDKVMKQLKRRRYTGWGRLSRKLINGIRDKQSGKTILDFLKSDGFANRNFMQLIHDDSLTFKEDIQKAQVSGQGDSLHEHIANLAGSPAIKKGILQTVKVVDELVKVMGRHKPENIVIEMARENQTTQKGQKNSRERMKRIEEGIKELGSQILKEHPVENTQLQNEKLYLYYLQNGRDMYVDQELDINRLSDYDVDHIVPQSFLKDDSIDNKVLTRSDKNRGKSDNVPSEEVVKKMKNYWRQLLNAKLITQRKFDNLTKAERGGLSELDKAGFIKRQLVETRQITKHVAQILDSRMNTKYDENDKLIREVKVITLKSKLVSDFRKDFQFYKVREINNYHHAHDAYLNAVVGTALIKKYPKLESEFVYGDYKVYDVRKMIAKSEQEIGKATAKYFFYSNIMNFFKTEITLANGEIRKRPLIETNGETGEIVWDKGRDFATVRKVLSMPQVNIVKKTEVQTGGFSKESILPKRNSDKLIARKKDWDPKKYGGFDSPTVAYSVLVVAKVEKGKSKKLKSVKELLGITIMERSSFEKNPIDFLEAKGYKEVKKDLIIKLPKYSLFELENGRKRMLASAGELQKGNELALPSKYVNFLYLASHYEKLKGSPEDNEQKQLFVEQHKHYLDEIIEQISEFSKRVILADANLDKVLSAYNKHRDKPIREQAENIIHLFTLTNLGAPAAFKYFDTTIDRKRYTSTKEVLDATLIHQSITGLYETRIDLSQLGGDXPXPXPXPXPXPXPXPXPXPXPXPXPXPMVSKGEEDNMAIIKEFMRFKVHMEGSVNGHEFEIEGEGEGRPYEGTQTAKLKVTKGGPLPFAWDILSPQFMYGSKAYVKHPADIPDYLKLSFPEGFKWERVMNFEDGGVVTVTQDSSLQDGEFIYKVKLRGTNFPSDGPVMQKKTMGWEASSERMYPEDGALKGEIKQRLKLKDGGHYDAEVKTTYKAKKPVQLPGAYNVNIKLDITSHNEDYTIVEQYERAEGRHSTGGMDELYK

SEQ ID NO: 105 - protein, 1619 aa, synthetic construct
  REGION 1..1619: note = SYNTHETIC
MDKKYSIGLDIGTNSVGWAVITDEYKVPSKKFKVLGNTDRHSIKKNLIGALLFDSGETAEATRLKRTARRRYTRRKNRICYLQEIFSNEMAKVDDSFFHRLEESFLVEEDKKHERHPIFGNIVDEVAYHEKYPTIYHLRKKLVDSTDKADLRLIYLALAHMIKFRGHFLIEGDLNPDNSDVDKLFIQLVQTYNQLFEENPINASGVDAKAILSARLSKSRRLENLIAQLPGEKKNGLFGNLIALSLGLTPNFKSNFDLAEDAKLQLSKDTYDDDLDNLLAQIGDQYADLFLAAKNLSDAILLSDILRVNTEITKAPLSASMIKRYDEHHQDLTLLKALVRQQLPEKYKEIFFDQSKNGYAGYIDGGASQEEFYKFIKPILEKMDGTEELLVKLNREDLLRKQRTFDNGSIPHQIHLGELHAILRRQEDFYPFLKDNREKIEKILTFRIPYYVGPLARGNSRFAWMTRKSEETITPWNFEEVVDKGASAQSFIERMTNFDKNLPNEKVLPKHSLLYEYFTVYNELTKVKYVTEGMRKPAFLSGEQKKAIVDLLFKTNRKVTVKQLKEDYFKKIECFDSVEISGVEDRFNASLGTYHDLLKIIKDKDFLDNEENEDILEDIVLTLTLFEDREMIEERLKTYAHLFDDKVMKQLKRRRYTGWGRLSRKLINGIRDKQSGKTILDFLKSDGFANRNFMQLIHDDSLTFKEDIQKAQVSGQGDSLHEHIANLAGSPAIKKGILQTVKVVDELVKVMGRHKPENIVIEMARENQTTQKGQKNSRERMKRIEEGIKELGSQILKEHPVENTQLQNEKLYLYYLQNGRDMYVDQELDINRLSDYDVDHIVPQSFLKDDSIDNKVLTRSDKNRGKSDNVPSEEVVKKMKNYWRQLLNAKLITQRKFDNLTKAERGGLSELDKAGFIKRQLVETRQITKHVAQILDSRMNTKYDENDKLIREVKVITLKSKLVSDFRKDFQFYKVREINNYHHAHDAYLNAVVGTALIKKYPKLESEFVYGDYKVYDVRKMIAKSEQEIGKATAKYFFYSNIMNFFKTEITLANGEIRKRPLIETNGETGEIVWDKGRDFATVRKVLSMPQVNIVKKTEVQTGGFSKESILPKRNSDKLIARKKDWDPKKYGGFDSPTVAYSVLVVAKVEKGKSKKLKSVKELLGITIMERSSFEKNPIDFLEAKGYKEVKKDLIIKLPKYSLFELENGRKRMLASAGELQKGNELALPSKYVNFLYLASHYEKLKGSPEDNEQKQLFVEQHKHYLDEIIEQISEFSKRVILADANLDKVLSAYNKHRDKPIREQAENIIHLFTLTNLGAPAAFKYFDTTIDRKRYTSTKEVLDATLIHQSITGLYETRIDLSQLGGDGGGGSEAAAKGGGGSMVSKGEEDNMAIIKEFMRFKVHMEGSVNGHEFEIEGEGEGRPYEGTQTAKLKVTKGGPLPFAWDILSPQFMYGSKAYVKHPADIPDYLKLSFPEGFKWERVMNFEDGGVVTVTQDSSLQDGEFIYKVKLRGTNFPSDGPVMQKKTMGWEASSERMYPEDGALKGEIKQRLKLKDGGHYDAEVKTTYKAKKPVQLPGAYNVNIKLDITSHNEDYTIVEQYERAEGRHSTGGMDELYK

SEQ ID NO: 106 - protein, 1558 aa, synthetic construct
  REGION 1..1558: note = SYNTHETIC
MTQFEGFTNLYQVSKTLRFELIPQGKTLKHIQEQGFIEEDKARNDHYKELKPIIDRIYKTYADQCLQLVQLDWENLSAAIDSYRKEKTEETRNALIEEQATYRNAIHDYFIGRTDNLTDAINKRHAEIYKGLFKAELFNGKVLKQLGTVTTTEHENALLRSFDKFTTYFSGFYENRKNVFSAEDISTAIPHRIVQDNFPKFKENCHIFTRLITAVPSLREHFENVKKAIGIFVSTSIEEVFSFPFYNQLLTQTQIDLYNQLLGGISREAGTEKIKGLNEVLNLAIQKNDETAHIIASLPHRFIPLFKQILSDRNTLSFILEEFKSDEEVIQSFCKYKTLLRNENVLETAEALFNELNSIDLTHIFISHKKLETISSALCDHWDTLRNALYERRISELTGKITKSAKEKVQRSLKHEDINLQEIISAAGKELSEAFKQKTSEILSHAHAALDQPLPTTLKKQEEKEILKSQLDSLLGLYHLLDWFAVDESNEVDPEFSARLTGIKLEMEPSLSFYNKARNYATKKPYSVEKFKLNFQMPTLASGWDVNKEKNNGAILFVKNGLYYLGIMPKQKGRYKALSFEPTEKTSEGFDKMYYDYFPDAAKMIPKCSTQLKAVTAHFQTHTTPILLSNNFIEPLEITKEIYDLNNPEKEPKKFQTAYAKKTGDQKGYREALCKWIDFTRDFLSKYTKTTSIDLSSLRPSSQYKDLGEYYAELNPLLYHISFQRIAEKEIMDAVETGKLYLFQIYNKDFAKGHHGKPNLHTLYWTGLFSPENLAKTSIKLNGQAELFYRPKSRMKRMAHRLGEKMLNKKLKDQKTPIPDTLYQELYDYVNHRLSHDLSDEARALLPNVITKEVSHEIIKDRRFTSDKFFFHVPITLNYQAANSPSKFNQRVNAYLKEHPETPIIGIDRGERNLIYITVIDSTGKILEQRSLNTIQQFDYQKKLDNREKERVAARQAWSVVGTIKDLKQGYLSQVIHEIVDLMIHYQAVVVLENLNFGFKSKRTGIAEKAVYQQFEKMLIDKLNCLVLKDYPAEKVGGVLNPYQLTDQFTSFAKMGTQSGFLFYVPAPYTSKIDPLTGFVDPFVWKTIKNHESRKHFLEGFDFLHYDVKTGDFILHFKMNRNLSFQRGLPGFMPAWDIVFEKNETQFDAKGTPFIAGKRIVPVIENHRFTGRYRDLYPANELIALLEEKGIVFRDGSNILPKLLENDDSHAIDTMVALIRSVLQMRNSNAATGEDYINSPVRDLNGVCFDSRFQNPEWPMDADANGAYHIALKGQLLLNHLKESKDLKLQNGISNQDWLAYIQELRNGSAGSAAGSGEFMVSKGEELFTGVVPILVELDGDVNGHKFSVSGEGEGDATYGKLTLKFICTTGKLPVPWPTLVTTLTYGVQCFSRYPDHMKQHDFFKSAMPEGYVQERTIFFKDDGNYKTRAEVKFEGDTLVNRIELKGIDFKEDGNILGHKLEYNYNSHNVYIMADKQKNGIKVNFKIRHNIEDGSVQLADHYQQNTPIGDGPVLLPDNHYLSTQSALSKDPNEKRDHMVLLEFVTAAGITLGMDELYK

SEQ ID NO: 107 - protein, 1566 aa, synthetic construct
  REGION 1..1566: note = SYNTHETIC
MTQFEGFTNLYQVSKTLRFELIPQGKTLKHIQEQGFIEEDKARNDHYKELKPIIDRIYKTYADQCLQLVQLDWENLSAAIDSYRKEKTEETRNALIEEQATYRNAIHDYFIGRTDNLTDAINKRHAEIYKGLFKAELFNGKVLKQLGTVTTTEHENALLRSFDKFTTYFSGFYENRKNVFSAEDISTAIPHRIVQDNFPKFKENCHIFTRLITAVPSLREHFENVKKAIGIFVSTSIEEVFSFPFYNQLLTQTQIDLYNQLLGGISREAGTEKIKGLNEVLNLAIQKNDETAHIIASLPHRFIPLFKQILSDRNTLSFILEEFKSDEEVIQSFCKYKTLLRNENVLETAEALFNELNSIDLTHIFISHKKLETISSALCDHWDTLRNALYERRISELTGKITKSAKEKVQRSLKHEDINLQEIISAAGKELSEAFKQKTSEILSHAHAALDQPLPTTLKKQEEKEILKSQLDSLLGLYHLLDWFAVDESNEVDPEFSARLTGIKLEMEPSLSFYNKARNYATKKPYSVEKFKLNFQMPTLASGWDVNKEKNNGAILFVKNGLYYLGIMPKQKGRYKALSFEPTEKTSEGFDKMYYDYFPDAAKMIPKCSTQLKAVTAHFQTHTTPILLSNNFIEPLEITKEIYDLNNPEKEPKKFQTAYAKKTGDQKGYREALCKWIDFTRDFLSKYTKTTSIDLSSLRPSSQYKDLGEYYAELNPLLYHISFQRIAEKEIMDAVETGKLYLFQIYNKDFAKGHHGKPNLHTLYWTGLFSPENLAKTSIKLNGQAELFYRPKSRMKRMAHRLGEKMLNKKLKDQKTPIPDTLYQELYDYVNHRLSHDLSDEARALLPNVITKEVSHEIIKDRRFTSDKFFFHVPITLNYQAANSPSKFNQRVNAYLKEHPETPIIGIDRGERNLIYITVIDSTGKILEQRSLNTIQQFDYQKKLDNREKERVAARQAWSVVGTIKDLKQGYLSQVIHEIVDLMIHYQAVVVLENLNFGFKSKRTGIAEKAVYQQFEKMLIDKLNCLVLKDYPAEKVGGVLNPYQLTDQFTSFAKMGTQSGFLFYVPAPYTSKIDPLTGFVDPFVWKTIKNHESRKHFLEGFDFLHYDVKTGDFILHFKMNRNLSFQRGLPGFMPAWDIVFEKNETQFDAKGTPFIAGKRIVPVIENHRFTGRYRDLYPANELIALLEEKGIVFRDGSNILPKLLENDDSHAIDTMVALIRSVLQMRNSNAATGEDYINSPVRDLNGVCFDSRFQNPEWPMDADANGAYHIALKGQLLLNHLKESKDLKLQNGISNQDWLAYIQELRNGGGGSGGGGSGGGGSGGGGSMVSKGEELFTGVVPILVELDGDVNGHKFSVSGEGEGDATYGKLTLKFICTTGKLPVPWPTLVTTLTYGVQCFSRYPDHMKQHDFFKSAMPEGYVQERTIFFKDDGNYKTRAEVKFEGDTLVNRIELKGIDFKEDGNILGHKLEYNYNSHNVYIMADKQKNGIKVNFKIRHNIEDGSVQLADHYQQNTPIGDGPVLLPDNHYLSTQSALSKDPNEKRDHMVLLEFVTAAGITLGMDELYK

SEQ ID NO: 108 - protein, 1568 aa, synthetic construct
  REGION 1..1568: note = SYNTHETIC
MTQFEGFTNLYQVSKTLRFELIPQGKTLKHIQEQGFIEEDKARNDHYKELKPIIDRIYKTYADQCLQLVQLDWENLSAAIDSYRKEKTEETRNALIEEQATYRNAIHDYFIGRTDNLTDAINKRHAEIYKGLFKAELFNGKVLKQLGTVTTTEHENALLRSFDKFTTYFSGFYENRKNVFSAEDISTAIPHRIVQDNFPKFKENCHIFTRLITAVPSLREHFENVKKAIGIFVSTSIEEVFSFPFYNQLLTQTQIDLYNQLLGGISREAGTEKIKGLNEVLNLAIQKNDETAHIIASLPHRFIPLFKQILSDRNTLSFILEEFKSDEEVIQSFCKYKTLLRNENVLETAEALFNELNSIDLTHIFISHKKLETISSALCDHWDTLRNALYERRISELTGKITKSAKEKVQRSLKHEDINLQEIISAAGKELSEAFKQKTSEILSHAHAALDQPLPTTLKKQEEKEILKSQLDSLLGLYHLLDWFAVDESNEVDPEFSARLTGIKLEMEPSLSFYNKARNYATKKPYSVEKFKLNFQMPTLASGWDVNKEKNNGAILFVKNGLYYLGIMPKQKGRYKALSFEPTEKTSEGFDKMYYDYFPDAAKMIPKCSTQLKAVTAHFQTHTTPILLSNNFIEPLEITKEIYDLNNPEKEPKKFQTAYAKKTGDQKGYREALCKWIDFTRDFLSKYTKTTSIDLSSLRPSSQYKDLGEYYAELNPLLYHISFQRIAEKEIMDAVETGKLYLFQIYNKDFAKGHHGKPNLHTLYWTGLFSPENLAKTSIKLNGQAELFYRPKSRMKRMAHRLGEKMLNKKLKDQKTPIPDTLYQELYDYVNHRLSHDLSDEARALLPNVITKEVSHEIIKDRRFTSDKFFFHVPITLNYQAANSPSKFNQRVNAYLKEHPETPIIGIDRGERNLIYITVIDSTGKILEQRSLNTIQQFDYQKKLDNREKERVAARQAWSVVGTIKDLKQGYLSQVIHEIVDLMIHYQAVVVLENLNFGFKSKRTGIAEKAVYQQFEKMLIDKLNCLVLKDYPAEKVGGVLNPYQLTDQFTSFAKMGTQSGFLFYVPAPYTSKIDPLTGFVDPFVWKTIKNHESRKHFLEGFDFLHYDVKTGDFILHFKMNRNLSFQRGLPGFMPAWDIVFEKNETQFDAKGTPFIAGKRIVPVIENHRFTGRYRDLYPANELIALLEEKGIVFRDGSNILPKLLENDDSHAIDTMVALIRSVLQMRNSNAATGEDYINSPVRDLNGVCFDSRFQNPEWPMDADANGAYHIALKGQLLLNHLKESKDLKLQNGISNQDWLAYIQELRNAEAAAKEAAAKEAAAKEAAAKAMVSKGEELFTGVVPILVELDGDVNGHKFSVSGEGEGDATYGKLTLKFICTTGKLPVPWPTLVTTLTYGVQCFSRYPDHMKQHDFFKSAMPEGYVQERTIFFKDDGNYKTRAEVKFEGDTLVNRIELKGIDFKEDGNILGHKLEYNYNSHNVYIMADKQKNGIKVNFKIRHNIEDGSVQLADHYQQNTPIGDGPVLLPDNHYLSTQSALSKDPNEKRDHMVLLEFVTAAGITLGMDELYK

SEQ ID NO: 109 - protein, 1592 aa, synthetic construct
  REGION 1..1592: note = SYNTHETIC
MTQFEGFTNLYQVSKTLRFELIPQGKTLKHIQEQGFIEEDKARNDHYKELKPIIDRIYKTYADQCLQLVQLDWENLSAAIDSYRKEKTEETRNALIEEQATYRNAIHDYFIGRTDNLTDAINKRHAEIYKGLFKAELFNGKVLKQLGTVTTTEHENALLRSFDKFTTYFSGFYENRKNVFSAEDISTAIPHRIVQDNFPKFKENCHIFTRLITAVPSLREHFENVKKAIGIFVSTSIEEVFSFPFYNQLLTQTQIDLYNQLLGGISREAGTEKIKGLNEVLNLAIQKNDETAHIIASLPHRFIPLFKQILSDRNTLSFILEEFKSDEEVIQSFCKYKTLLRNENVLETAEALFNELNSIDLTHIFISHKKLETISSALCDHWDTLRNALYERRISELTGKITKSAKEKVQRSLKHEDINLQEIISAAGKELSEAFKQKTSEILSHAHAALDQPLPTTLKKQEEKEILKSQLDSLLGLYHLLDWFAVDESNEVDPEFSARLTGIKLEMEPSLSFYNKARNYATKKPYSVEKFKLNFQMPTLASGWDVNKEKNNGAILFVKNGLYYLGIMPKQKGRYKALSFEPTEKTSEGFDKMYYDYFPDAAKMIPKCSTQLKAVTAHFQTHTTPILLSNNFIEPLEITKEIYDLNNPEKEPKKFQTAYAKKTGDQKGYREALCKWIDFTRDFLSKYTKTTSIDLSSLRPSSQYKDLGEYYAELNPLLYHISFQRIAEKEIMDAVETGKLYLFQIYNKDFAKGHHGKPNLHTLYWTGLFSPENLAKTSIKLNGQAELFYRPKSRMKRMAHRLGEKMLNKKLKDQKTPIPDTLYQELYDYVNHRLSHDLSDEARALLPNVITKEVSHEIIKDRRFTSDKFFFHVPITLNYQAANSPSKFNQRVNAYLKEHPETPIIGIDRGERNLIYITVIDSTGKILEQRSLNTIQQFDYQKKLDNREKERVAARQAWSVVGTIKDLKQGYLSQVIHEIVDLMIHYQAVVVLENLNFGFKSKRTGIAEKAVYQQFEKMLIDKLNCLVLKDYPAEKVGGVLNPYQLTDQFTSFAKMGTQSGFLFYVPAPYTSKIDPLTGFVDPFVWKTIKNHESRKHFLEGFDFLHYDVKTGDFILHFKMNRNLSFQRGLPGFMPAWDIVFEKNETQFDAKGTPFIAGKRIVPVIENHRFTGRYRDLYPANELIALLEEKGIVFRDGSNILPKLLENDDSHAIDTMVALIRSVLQMRNSNAATGEDYINSPVRDLNGVCFDSRFQNPEWPMDADANGAYHIALKGQLLLNHLKESKDLKLQNGISNQDWLAYIQELRNAEAAAKEAAAKEAAAKEAAAKALEAEAAAKEAAAKEAAAKEAAAKAMVSKGEELFTGVVPILVELDGDVNGHKFSVSGEGEGDATYGKLTLKFICTTGKLPVPWPTLVTTLTYGVQCFSRYPDHMKQHDFFKSAMPEGYVQERTIFFKDDGNYKTRAEVKFEGDTLVNRIELKGIDFKEDGNILGHKLEYNYNSHNVYIMADKQKNGIKVNFKIRHNIEDGSVQLADHYQQNTPIGDGPVLLPDNHYLSTQSALSKDPNEKRDHMVLLEFVTAAGITLGMDELYK

SEQ ID NO: 110 - protein, 1596 aa, synthetic construct
  REGION 1..1596: note = SYNTHETIC
MTQFEGFTNLYQVSKTLRFELIPQGKTLKHIQEQGFIEEDKARNDHYKELKPIIDRIYKTYADQCLQLVQLDWENLSAAIDSYRKEKTEETRNALIEEQATYRNAIHDYFIGRTDNLTDAINKRHAEIYKGLFKAELFNGKVLKQLGTVTTTEHENALLRSFDKFTTYFSGFYENRKNVFSAEDISTAIPHRIVQDNFPKFKENCHIFTRLITAVPSLREHFENVKKAIGIFVSTSIEEVFSFPFYNQLLTQTQIDLYNQLLGGISREAGTEKIKGLNEVLNLAIQKNDETAHIIASLPHRFIPLFKQILSDRNTLSFILEEFKSDEEVIQSFCKYKTLLRNENVLETAEALFNELNSIDLTHIFISHKKLETISSALCDHWDTLRNALYERRISELTGKITKSAKEKVQRSLKHEDINLQEIISAAGKELSEAFKQKTSEILSHAHAALDQPLPTTLKKQEEKEILKSQLDSLLGLYHLLDWFAVDESNEVDPEFSARLTGIKLEMEPSLSFYNKARNYATKKPYSVEKFKLNFQMPTLASGWDVNKEKNNGAILFVKNGLYYLGIMPKQKGRYKALSFEPTEKTSEGFDKMYYDYFPDAAKMIPKCSTQLKAVTAHFQTHTTPILLSNNFIEPLEITKEIYDLNNPEKEPKKFQTAYAKKTGDQKGYREALCKWIDFTRDFLSKYTKTTSIDLSSLRPSSQYKDLGEYYAELNPLLYHISFQRIAEKEIMDAVETGKLYLFQIYNKDFAKGHHGKPNLHTLYWTGLFSPENLAKTSIKLNGQAELFYRPKSRMKRMAHRLGEKMLNKKLKDQKTPIPDTLYQELYDYVNHRLSHDLSDEARALLPNVITKEVSHEIIKDRRFTSDKFFFHVPITLNYQAANSPSKFNQRVNAYLKEHPETPIIGIDRGERNLIYITVIDSTGKILEQRSLNTIQQFDYQKKLDNREKERVAARQAWSVVGTIKDLKQGYLSQVIHEIVDLMIHYQAVVVLENLNFGFKSKRTGIAEKAVYQQFEKMLIDKLNCLVLKDYPAEKVGGVLNPYQLTDQFTSFAKMGTQSGFLFYVPAPYTSKIDPLTGFVDPFVWKTIKNHESRKHFLEGFDFLHYDVKTGDFILHFKMNRNLSFQRGLPGFMPAWDIVFEKNETQFDAKGTPFIAGKRIVPVIENHRFTGRYRDLYPANELIALLEEKGIVFRDGSNILPKLLENDDSHAIDTMVALIRSVLQMRNSNAATGEDYINSPVRDLNGVCFDSRFQNPEWPMDADANGAYHIALKGQLLLNHLKESKDLKLQNGISNQDWLAYIQELRNLEAEAAAKEAAAKEAAAKEAAAKALEAEAAAKEAAAKEAAAKEAAAKALEMVSKGEELFTGVVPILVELDGDVNGHKFSVSGEGEGDATYGKLTLKFICTTGKLPVPWPTLVTTLTYGVQCFSRYPDHMKQHDFFKSAMPEGYVQERTIFFKDDGNYKTRAEVKFEGDTLVNRIELKGIDFKEDGNILGHKLEYNYNSHNVYIMADKQKNGIKVNFKIRHNIEDGSVQLADHYQQNTPIGDGPVLLPDNHYLSTQSALSKDPNEKRDHMVLLEFVTAAGITLGMDELYK

SEQ ID NO: 111 - protein, 1549 aa, synthetic construct
  REGION 1..1549: note = SYNTHETIC
MTQFEGFTNLYQVSKTLRFELIPQGKTLKHIQEQGFIEEDKARNDHYKELKPIIDRIYKTYADQCLQLVQLDWENLSAAIDSYRKEKTEETRNALIEEQATYRNAIHDYFIGRTDNLTDAINKRHAEIYKGLFKAELFNGKVLKQLGTVTTTEHENALLRSFDKFTTYFSGFYENRKNVFSAEDISTAIPHRIVQDNFPKFKENCHIFTRLITAVPSLREHFENVKKAIGIFVSTSIEEVFSFPFYNQLLTQTQIDLYNQLLGGISREAGTEKIKGLNEVLNLAIQKNDETAHIIASLPHRFIPLFKQILSDRNTLSFILEEFKSDEEVIQSFCKYKTLLRNENVLETAEALFNELNSIDLTHIFISHKKLETISSALCDHWDTLRNALYERRISELTGKITKSAKEKVQRSLKHEDINLQEIISAAGKELSEAFKQKTSEILSHAHAALDQPLPTTLKKQEEKEILKSQLDSLLGLYHLLDWFAVDESNEVDPEFSARLTGIKLEMEPSLSFYNKARNYATKKPYSVEKFKLNFQMPTLASGWDVNKEKNNGAILFVKNGLYYLGIMPKQKGRYKALSFEPTEKTSEGFDKMYYDYFPDAAKMIPKCSTQLKAVTAHFQTHTTPILLSNNFIEPLEITKEIYDLNNPEKEPKKFQTAYAKKTGDQKGYREALCKWIDFTRDFLSKYTKTTSIDLSSLRPSSQYKDLGEYYAELNPLLYHISFQRIAEKEIMDAVETGKLYLFQIYNKDFAKGHHGKPNLHTLYWTGLFSPENLAKTSIKLNGQAELFYRPKSRMKRMAHRLGEKMLNKKLKDQKTPIPDTLYQELYDYVNHRLSHDLSDEARALLPNVITKEVSHEIIKDRRFTSDKFFFHVPITLNYQAANSPSKFNQRVNAYLKEHPETPIIGIDRGERNLIYITVIDSTGKILEQRSLNTIQQFDYQKKLDNREKERVAARQAWSVVGTIKDLKQGYLSQVIHEIVDLMIHYQAVVVLENLNFGFKSKRTGIAEKAVYQQFEKMLIDKLNCLVLKDYPAEKVGGVLNPYQLTDQFTSFAKMGTQSGFLFYVPAPYTSKIDPLTGFVDPFVWKTIKNHESRKHFLEGFDFLHYDVKTGDFILHFKMNRNLSFQRGLPGFMPAWDIVFEKNETQFDAKGTPFIAGKRIVPVIENHRFTGRYRDLYPANELIALLEEKGIVFRDGSNILPKLLENDDSHAIDTMVALIRSVLQMRNSNAATGEDYINSPVRDLNGVCFDSRFQNPEWPMDADANGAYHIALKGQLLLNHLKESKDLKLQNGISNQDWLAYIQELRNAPAMVSKGEELFTGVVPILVELDGDVNGHKFSVSGEGEGDATYGKLTLKFICTTGKLPVPWPTLVTTLTYGVQCFSRYPDHMKQHDFFKSAMPEGYVQERTIFFKDDGNYKTRAEVKFEGDTLVNRIELKGIDFKEDGNILGHKLEYNYNSHNVYIMADKQKNGIKVNFKIRHNIEDGSVQLADHYQQNTPIGDGPVLLPDNHYLSTQSALSKDPNEKRDHMVLLEFVTAAGITLGMDELYK

SEQ ID NO: 112 - protein, 1551 aa, synthetic construct
  REGION 1..1551: note = SYNTHETIC
MTQFEGFTNLYQVSKTLRFELIPQGKTLKHIQEQGFIEEDKARNDHYKELKPIIDRIYKTYADQCLQLVQLDWENLSAAIDSYRKEKTEETRNALIEEQATYRNAIHDYFIGRTDNLTDAINKRHAEIYKGLFKAELFNGKVLKQLGTVTTTEHENALLRSFDKFTTYFSGFYENRKNVFSAEDISTAIPHRIVQDNFPKFKENCHIFTRLITAVPSLREHFENVKKAIGIFVSTSIEEVFSFPFYNQLLTQTQIDLYNQLLGGISREAGTEKIKGLNEVLNLAIQKNDETAHIIASLPHRFIPLFKQILSDRNTLSFILEEFKSDEEVIQSFCKYKTLLRNENVLETAEALFNELNSIDLTHIFISHKKLETISSALCDHWDTLRNALYERRISELTGKITKSAKEKVQRSLKHEDINLQEIISAAGKELSEAFKQKTSEILSHAHAALDQPLPTTLKKQEEKEILKSQLDSLLGLYHLLDWFAVDESNEVDPEFSARLTGIKLEMEPSLSFYNKARNYATKKPYSVEKFKLNFQMPTLASGWDVNKEKNNGAILFVKNGLYYLGIMPKQKGRYKALSFEPTEKTSEGFDKMYYDYFPDAAKMIPKCSTQLKAVTAHFQTHTTPILLSNNFIEPLEITKEIYDLNNPEKEPKKFQTAYAKKTGDQKGYREALCKWIDFTRDFLSKYTKTTSIDLSSLRPSSQYKDLGEYYAELNPLLYHISFQRIAEKEIMDAVETGKLYLFQIYNKDFAKGHHGKPNLHTLYWTGLFSPENLAKTSIKLNGQAELFYRPKSRMKRMAHRLGEKMLNKKLKDQKTPIPDTLYQELYDYVNHRLSHDLSDEARALLPNVITKEVSHEIIKDRRFTSDKFFFHVPITLNYQAANSPSKFNQRVNAYLKEHPETPIIGIDRGERNLIYITVIDSTGKILEQRSLNTIQQFDYQKKLDNREKERVAARQAWSVVGTIKDLKQGYLSQVIHEIVDLMIHYQAVVVLENLNFGFKSKRTGIAEKAVYQQFEKMLIDKLNCLVLKDYPAEKVGGVLNPYQLTDQFTSFAKMGTQSGFLFYVPAPYTSKIDPLTGFVDPFVWKTIKNHESRKHFLEGFDFLHYDVKTGDFILHFKMNRNLSFQRGLPGFMPAWDIVFEKNETQFDAKGTPFIAGKRIVPVIENHRFTGRYRDLYPANELIALLEEKGIVFRDGSNILPKLLENDDSHAIDTMVALIRSVLQMRNSNAATGEDYINSPVRDLNGVCFDSRFQNPEWPMDADANGAYHIALKGQLLLNHLKESKDLKLQNGISNQDWLAYIQELRNAPAPAMVSKGEELFTGVVPILVELDGDVNGHKFSVSGEGEGDATYGKLTLKFICTTGKLPVPWPTLVTTLTYGVQCFSRYPDHMKQHDFFKSAMPEGYVQERTIFFKDDGNYKTRAEVKFEGDTLVNRIELKGIDFKEDGNILGHKLEYNYNSHNVYIMADKQKNGIKVNFKIRHNIEDGSVQLADHYQQNTPIGDGPVLLPDNHYLSTQSALSKDPNEKRDHMVLLEFVTAAGITLGMDELYK

SEQ ID NO: 113 - protein, 1553 aa, synthetic construct
  REGION 1..1553: note = SYNTHETIC
MTQFEGFTNLYQVSKTLRFELIPQGKTLKHIQEQGFIEEDKARNDHYKELKPIIDRIYKTYADQCLQLVQLDWENLSAAIDSYRKEKTEETRNALIEEQATYRNAIHDYFIGRTDNLTDAINKRHAEIYKGLFKAELFNGKVLKQLGTVTTTEHENALLRSFDKFTTYFSGFYENRKNVFSAEDISTAIPHRIVQDNFPKFKENCHIFTRLITAVPSLREHFENVKKAIGIFVSTSIEEVFSFPFYNQLLTQTQIDLYNQLLGGISREAGTEKIKGLNEVLNLAIQKNDETAHIIASLPHRFIPLFKQILSDRNTLSFILEEFKSDEEVIQSFCKYKTLLRNENVLETAEALFNELNSIDLTHIFISHKKLETISSALCDHWDTLRNALYERRISELTGKITKSAKEKVQRSLKHEDINLQEIISAAGKELSEAFKQKTSEILSHAHAALDQPLPTTLKKQEEKEILKSQLDSLLGLYHLLDWFAVDESNEVDPEFSARLTGIKLEMEPSLSFYNKARNYATKKPYSVEKFKLNFQMPTLASGWDVNKEKNNGAILFVKNGLYYLGIMPKQKGRYKALSFEPTEKTSEGFDKMYYDYFPDAAKMIPKCSTQLKAVTAHFQTHTTPILLSNNFIEPLEITKEIYDLNNPEKEPKKFQTAYAKKTGDQKGYREALCKWIDFTRDFLSKYTKTTSIDLSSLRPSSQYKDLGEYYAELNPLLYHISFQRIAEKEIMDAVETGKLYLFQIYNKDFAKGHHGKPNLHTLYWTGLFSPENLAKTSIKLNGQAELFYRPKSRMKRMAHRLGEKMLNKKLKDQKTPIPDTLYQELYDYVNHRLSHDLSDEARALLPNVITKEVSHEIIKDRRFTSDKFFFHVPITLNYQAANSPSKFNQRVNAYLKEHPETPIIGIDRGERNLIYITVIDSTGKILEQRSLNTIQQFDYQKKLDNREKERVAARQAWSVVGTIKDLKQGYLSQVIHEIVDLMIHYQAVVVLENLNFGFKSKRTGIAEKAVYQQFEKMLIDKLNCLVLKDYPAEKVGGVLNPYQLTDQFTSFAKMGTQSGFLFYVPAPYTSKIDPLTGFVDPFVWKTIKNHESRKHFLEGFDFLHYDVKTGDFILHFKMNRNLSFQRGLPGFMPAWDIVFEKNETQFDAKGTPFIAGKRIVPVIENHRFTGRYRDLYPANELIALLEEKGIVFRDGSNILPKLLENDDSHAIDTMVALIRSVLQMRNSNAATGEDYINSPVRDLNGVCFDSRFQNPEWPMDADANGAYHIALKGQLLLNHLKESKDLKLQNGISNQDWLAYIQELRNAPAPAPAMVSKGEELFTGVVPILVELDGDVNGHKFSVSGEGEGDATYGKLTLKFICTTGKLPVPWPTLVTTLTYGVQCFSRYPDHMKQHDFFKSAMPEGYVQERTIFFKDDGNYKTRAEVKFEGDTLVNRIELKGIDFKEDGNILGHKLEYNYNSHNVYIMADKQKNGIKVNFKIRHNIEDGSVQLADHYQQNTPIGDGPVLLPDNHYLSTQSALSKDPNEKRDHMVLLEFVTAAGITLGMDELYK

SEQ ID NO: 114 - protein, 1555 aa, synthetic construct
  REGION 1..1555: note = SYNTHETIC
MTQFEGFTNLYQVSKTLRFELIPQGKTLKHIQEQGFIEEDKARNDHYKELKPIIDRIYKTYADQCLQLVQLDWENLSAAIDSYRKEKTEETRNALIEEQATYRNAIHDYFIGRTDNLTDAINKRHAEIYKGLFKAELFNGKVLKQLGTVTTTEHENALLRSFDKFTTYFSGFYENRKNVFSAEDISTAIPHRIVQDNFPKFKENCHIFTRLITAVPSLREHFENVKKAIGIFVSTSIEEVFSFPFYNQLLTQTQIDLYNQLLGGISREAGTEKIKGLNEVLNLAIQKNDETAHIIASLPHRFIPLFKQILSDRNTLSFILEEFKSDEEVIQSFCKYKTLLRNENVLETAEALFNELNSIDLTHIFISHKKLETISSALCDHWDTLRNALYERRISELTGKITKSAKEKVQRSLKHEDINLQEIISAAGKELSEAFKQKTSEILSHAHAALDQPLPTTLKKQEEKEILKSQLDSLLGLYHLLDWFAVDESNEVDPEFSARLTGIKLEMEPSLSFYNKARNYATKKPYSVEKFKLNFQMPTLASGWDVNKEKNNGAILFVKNGLYYLGIMPKQKGRYKALSFEPTEKTSEGFDKMYYDYFPDAAKMIPKCSTQLKAVTAHFQTHTTPILLSNNFIEPLEITKEIYDLNNPEKEPKKFQTAYAKKTGDQKGYREALCKWIDFTRDFLSKYTKTTSIDLSSLRPSSQYKDLGEYYAELNPLLYHISFQRIAEKEIMDAVETGKLYLFQIYNKDFAKGHHGKPNLHTLYWTGLFSPENLAKTSIKLNGQAELFYRPKSRMKRMAHRLGEKMLNKKLKDQKTPIPDTLYQELYDYVNHRLSHDLSDEARALLPNVITKEVSHEIIKDRRFTSDKFFFHVPITLNYQAANSPSKFNQRVNAYLKEHPETPIIGIDRGERNLIYITVIDSTGKILEQRSLNTIQQFDYQKKLDNREKERVAARQAWSVVGTIKDLKQGYLSQVIHEIVDLMIHYQAVVVLENLNFGFKSKRTGIAEKAVYQQFEKMLIDKLNCLVLKDYPAEKVGGVLNPYQLTDQFTSFAKMGTQSGFLFYVPAPYTSKIDPLTGFVDPFVWKTIKNHESRKHFLEGFDFLHYDVKTGDFILHFKMNRNLSFQRGLPGFMPAWDIVFEKNETQFDAKGTPFIAGKRIVPVIENHRFTGRYRDLYPANELIALLEEKGIVFRDGSNILPKLLENDDSHAIDTMVALIRSVLQMRNSNAATGEDYINSPVRDLNGVCFDSRFQNPEWPMDADANGAYHIALKGQLLLNHLKESKDLKLQNGISNQDWLAYIQELRNAPAPAPAPAMVSKGEELFTGVVPILVELDGDVNGHKFSVSGEGEGDATYGKLTLKFICTTGKLPVPWPTLVTTLTYGVQCFSRYPDHMKQHDFFKSAMPEGYVQERTIFFKDDGNYKTRAEVKFEGDTLVNRIELKGIDFKEDGNILGHKLEYNYNSHNVYIMADKQKNGIKVNFKIRHNIEDGSVQLADHYQQNTPIGDGPVLLPDNHYLSTQSALSKDPNEKRDHMVLLEFVTAAGITLGMDELYK

SEQ ID NO: 115 - protein, 1557 aa, synthetic construct
  REGION 1..1557: note = SYNTHETIC
MTQFEGFTNLYQVSKTLRFELIPQGKTLKHIQEQGFIEEDKARNDHYKELKPIIDRIYKTYADQCLQLVQLDWENLSAAIDSYRKEKTEETRNALIEEQATYRNAIHDYFIGRTDNLTDAINKRHAEIYKGLFKAELFNGKVLKQLGTVTTTEHENALLRSFDKFTTYFSGFYENRKNVFSAEDISTAIPHRIVQDNFPKFKENCHIFTRLITAVPSLREHFENVKKAIGIFVSTSIEEVFSFPFYNQLLTQTQIDLYNQLLGGISREAGTEKIKGLNEVLNLAIQKNDETAHIIASLPHRFIPLFKQILSDRNTLSFILEEFKSDEEVIQSFCKYKTLLRNENVLETAEALFNELNSIDLTHIFISHKKLETISSALCDHWDTLRNALYERRISELTGKITKSAKEKVQRSLKHEDINLQEIISAAGKELSEAFKQKTSEILSHAHAALDQPLPTTLKKQEEKEILKSQLDSLLGLYHLLDWFAVDESNEVDPEFSARLTGIKLEMEPSLSFYNKARNYATKKPYSVEKFKLNFQMPTLASGWDVNKEKNNGAILFVKNGLYYLGIMPKQKGRYKALSFEPTEKTSEGFDKMYYDYFPDAAKMIPKCSTQLKAVTAHFQTHTTPILLSNNFIEPLEITKEIYDLNNPEKEPKKFQTAYAKKTGDQKGYREALCKWIDFTRDFLSKYTKTTSIDLSSLRPSSQYKDLGEYYAELNPLLYHISFQRIAEKEIMDAVETGKLYLFQIYNKDFAKGHHGKPNLHTLYWTGLFSPENLAKTSIKLNGQAELFYRPKSRMKRMAHRLGEKMLNKKLKDQKTPIPDTLYQELYDYVNHRLSHDLSDEARALLPNVITKEVSHEIIKDRRFTSDKFFFHVPITLNYQAANSPSKFNQRVNAYLKEHPETPIIGIDRGERNLIYITVIDSTGKILEQRSLNTIQQFDYQKKLDNREKERVAARQAWSVVGTIKDLKQGYLSQVIHEIVDLMIHYQAVVVLENLNFGFKSKRTGIAEKAVYQQFEKMLIDKLNCLVLKDYPAEKVGGVLNPYQLTDQFTSFAKMGTQSGFLFYVPAPYTSKIDPLTGFVDPFVWKTIKNHESRKHFLEGFDFLHYDVKTGDFILHFKMNRNLSFQRGLPGFMPAWDIVFEKNETQFDAKGTPFIAGKRIVPVIENHRFTGRYRDLYPANELIALLEEKGIVFRDGSNILPKLLENDDSHAIDTMVALIRSVLQMRNSNAATGEDYINSPVRDLNGVCFDSRFQNPEWPMDADANGAYHIALKGQLLLNHLKESKDLKLQNGISNQDWLAYIQELRNAPAPAPAPAPAMVSKGEELFTGVVPILVELDGDVNGHKFSVSGEGEGDATYGKLTLKFICTTGKLPVPWPTLVTTLTYGVQCFSRYPDHMKQHDFFKSAMPEGYVQERTIFFKDDGNYKTRAEVKFEGDTLVNRIELKGIDFKEDGNILGHKLEYNYNSHNVYIMADKQKNGIKVNFKIRHNIEDGSVQLADHYQQNTPIGDGPVLLPDNHYLSTQSALSKDPNEKRDHMVLLEFVTAAGITLGMDELYK

SEQ ID NO: 116 - protein, 1559 aa, synthetic construct
  REGION 1..1559: note = SYNTHETIC
MTQFEGFTNLYQVSKTLRFELIPQGKTLKHIQEQGFIEEDKARNDHYKELKPIIDRIYKTYADQCLQLVQLDWENLSAAIDSYRKEKTEETRNALIEEQATYRNAIHDYFIGRTDNLTDAINKRHAEIYKGLFKAELFNGKVLKQLGTVTTTEHENALLRSFDKFTTYFSGFYENRKNVFSAEDISTAIPHRIVQDNFPKFKENCHIFTRLITAVPSLREHFENVKKAIGIFVSTSIEEVFSFPFYNQLLTQTQIDLYNQLLGGISREAGTEKIKGLNEVLNLAIQKNDETAHIIASLPHRFIPLFKQILSDRNTLSFILEEFKSDEEVIQSFCKYKTLLRNENVLETAEALFNELNSIDLTHIFISHKKLETISSALCDHWDTLRNALYERRISELTGKITKSAKEKVQRSLKHEDINLQEIISAAGKELSEAFKQKTSEILSHAHAALDQPLPTTLKKQEEKEILKSQLDSLLGLYHLLDWFAVDESNEVDPEFSARLTGIKLEMEPSLSFYNKARNYATKKPYSVEKFKLNFQMPTLASGWDVNKEKNNGAILFVKNGLYYLGIMPKQKGRYKALSFEPTEKTSEGFDKMYYDYFPDAAKMIPKCSTQLKAVTAHFQTHTTPILLSNNFIEPLEITKEIYDLNNPEKEPKKFQTAYAKKTGDQKGYREALCKWIDFTRDFLSKYTKTTSIDLSSLRPSSQYKDLGEYYAELNPLLYHISFQRIAEKEIMDAVETGKLYLFQIYNKDFAKGHHGKPNLHTLYWTGLFSPENLAKTSIKLNGQAELFYRPKSRMKRMAHRLGEKMLNKKLKDQKTPIPDTLYQELYDYVNHRLSHDLSDEARALLPNVITKEVSHEIIKDRRFTSDKFFFHVPITLNYQAANSPSKFNQRVNAYLKEHPETPIIGIDRGERNLIYITVIDSTGKILEQRSLNTIQQFDYQKKLDNREKERVAARQAWSVVGTIKDLKQGYLSQVIHEIVDLMIHYQAVVVLENLNFGFKSKRTGIAEKAVYQQFEKMLIDKLNCLVLKDYPAEKVGGVLNPYQLTDQFTSFAKMGTQSGFLFYVPAPYTSKIDPLTGFVDPFVWKTIKNHESRKHFLEGFDFLHYDVKTGDFILHFKMNRNLSFQRGLPGFMPAWDIVFEKNETQFDAKGTPFIAGKRIVPVIENHRFTGRYRDLYPANELIALLEEKGIVFRDGSNILPKLLENDDSHAIDTMVALIRSVLQMRNSNAATGEDYINSPVRDLNGVCFDSRFQNPEWPMDADANGAYHIALKGQLLLNHLKESKDLKLQNGISNQDWLAYIQELRNAPAPAPAPAPAPAMVSKGEELFTGVVPILVELDGDVNGHKFSVSGEGEGDATYGKLTLKFICTTGKLPVPWPTLVTTLTYGVQCFSRYPDHMKQHDFFKSAMPEGYVQERTIFFKDDGNYKTRAEVKFEGDTLVNRIELKGIDFKEDGNILGHKLEYNYNSHNVYIMADKQKNGIKVNFKIRHNIEDGSVQLADHYQQNTPIGDGPVLLPDNHYLSTQSALSKDPNEKRDHMVLLEFVTAAGITLGMDELYK

SEQ ID NO: 117 - protein, 1561 aa, synthetic construct
  REGION 1..1561: note = SYNTHETIC
MTQFEGFTNLYQVSKTLRFELIPQGKTLKHIQEQGFIEEDKARNDHYKELKPIIDRIYKTYADQCLQLVQLDWENLSAAIDSYRKEKTEETRNALIEEQATYRNAIHDYFIGRTDNLTDAINKRHAEIYKGLFKAELFNGKVLKQLGTVTTTEHENALLRSFDKFTTYFSGFYENRKNVFSAEDISTAIPHRIVQDNFPKFKENCHIFTRLITAVPSLREHFENVKKAIGIFVSTSIEEVFSFPFYNQLLTQTQIDLYNQLLGGISREAGTEKIKGLNEVLNLAIQKNDETAHIIASLPHRFIPLFKQILSDRNTLSFILEEFKSDEEVIQSFCKYKTLLRNENVLETAEALFNELNSIDLTHIFISHKKLETISSALCDHWDTLRNALYERRISELTGKITKSAKEKVQRSLKHEDINLQEIISAAGKELSEAFKQKTSEILSHAHAALDQPLPTTLKKQEEKEILKSQLDSLLGLYHLLDWFAVDESNEVDPEFSARLTGIKLEMEPSLSFYNKARNYATKKPYSVEKFKLNFQMPTLASGWDVNKEKNNGAILFVKNGLYYLGIMPKQKGRYKALSFEPTEKTSEGFDKMYYDYFPDAAKMIPKCSTQLKAVTAHFQTHTTPILLSNNFIEPLEITKEIYDLNNPEKEPKKFQTAYAKKTGDQKGYREALCKWIDFTRDFLSKYTKTTSIDLSSLRPSSQYKDLGEYYAELNPLLYHISFQRIAEKEIMDAVETGKLYLFQIYNKDFAKGHHGKPNLHTLYWTGLFSPENLAKTSIKLNGQAELFYRPKSRMKRMAHRLGEKMLNKKLKDQKTPIPDTLYQELYDYVNHRLSHDLSDEARALLPNVITKEVSHEIIKDRRFTSDKFFFHVPITLNYQAANSPSKFNQRVNAYLKEHPETPIIGIDRGERNLIYITVIDSTGKILEQRSLNTIQQFDYQKKLDNREKERVAARQAWSVVGTIKDLKQGYLSQVIHEIVDLMIHYQAVVVLENLNFGFKSKRTGIAEKAVYQQFEKMLIDKLNCLVLKDYPAEKVGGVLNPYQLTDQFTSFAKMGTQSGFLFYVPAPYTSKIDPLTGFVDPFVWKTIKNHESRKHFLEGFDFLHYDVKTGDFILHFKMNRNLSFQRGLPGFMPAWDIVFEKNETQFDAKGTPFIAGKRIVPVIENHRFTGRYRDLYPANELIALLEEKGIVFRDGSNILPKLLENDDSHAIDTMVALIRSVLQMRNSNAATGEDYINSPVRDLNGVCFDSRFQNPEWPMDADANGAYHIALKGQLLLNHLKESKDLKLQNGISNQDWLAYIQELRNAPAPAPAPAPAPAPAMVSKGEELFTGVVPILVELDGDVNGHKFSVSGEGEGDATYGKLTLKFICTTGKLPVPWPTLVTTLTYGVQCFSRYPDHMKQHDFFKSAMPEGYVQERTIFFKDDGNYKTRAEVKFEGDTLVNRIELKGIDFKEDGNILGHKLEYNYNSHNVYIMADKQKNGIKVNFKIRHNIEDGSVQLADHYQQNTPIGDGPVLLPDNHYLSTQSALSKDPNEKRDHMVLLEFVTAAGITLGMDELYK

SEQ ID NO: 118 - protein, 1563 aa, synthetic construct
  REGION 1..1563: note = SYNTHETIC
MTQFEGFTNLYQVSKTLRFELIPQGKTLKHIQEQGFIEEDKARNDHYKELKPIIDRIYKTYADQCLQLVQLDWENLSAAIDSYRKEKTEETRNALIEEQATYRNAIHDYFIGRTDNLTDAINKRHAEIYKGLFKAELFNGKVLKQLGTVTTTEHENALLRSFDKFTTYFSGFYENRKNVFSAEDISTAIPHRIVQDNFPKFKENCHIFTRLITAVPSLREHFENVKKAIGIFVSTSIEEVFSFPFYNQLLTQTQIDLYNQLLGGISREAGTEKIKGLNEVLNLAIQKNDETAHIIASLPHRFIPLFKQILSDRNTLSFILEEFKSDEEVIQSFCKYKTLLRNENVLETAEALFNELNSIDLTHIFISHKKLETISSALCDHWDTLRNALYERRISELTGKITKSAKEKVQRSLKHEDINLQEIISAAGKELSEAFKQKTSEILSHAHAALDQPLPTTLKKQEEKEILKSQLDSLLGLYHLLDWFAVDESNEVDPEFSARLTGIKLEMEPSLSFYNKARNYATKKPYSVEKFKLNFQMPTLASGWDVNKEKNNGAILFVKNGLYYLGIMPKQKGRYKALSFEPTEKTSEGFDKMYYDYFPDAAKMIPKCSTQLKAVTAHFQTHTTPILLSNNFIEPLEITKEIYDLNNPEKEPKKFQTAYAKKTGDQKGYREALCKWIDFTRDFLSKYTKTTSIDLSSLRPSSQYKDLGEYYAELNPLLYHISFQRIAEKEIMDAVETGKLYLFQIYNKDFAKGHHGKPNLHTLYWTGLFSPENLAKTSIKLNGQAELFYRPKSRMKRMAHRLGEKMLNKKLKDQKTPIPDTLYQELYDYVNHRLSHDLSDEARALLPNVITKEVSHEIIKDRRFTSDKFFFHVPITLNYQAANSPSKFNQRVNAYLKEHPETPIIGIDRGERNLIYITVIDSTGKILEQRSLNTIQQFDYQKKLDNREKERVAARQAWSVVGTIKDLKQGYLSQVIHEIVDLMIHYQAVVVLENLNFGFKSKRTGIAEKAVYQQFEKMLIDKLNCLVLKDYPAEKVGGVLNPYQLTDQFTSFAKMGTQSGFLFYVPAPYTSKIDPLTGFVDPFVWKTIKNHESRKHFLEGFDFLHYDVKTGDFILHFKMNRNLSFQRGLPGFMPAWDIVFEKNETQFDAKGTPFIAGKRIVPVIENHRFTGRYRDLYPANELIALLEEKGIVFRDGSNILPKLLENDDSHAIDTMVALIRSVLQMRNSNAATGEDYINSPVRDLNGVCFDSRFQNPEWPMDADANGAYHIALKGQLLLNHLKESKDLKLQNGISNQDWLAYIQELRNAPAPAPAPAPAPAPAPAMVSKGEELFTGVVPILVELDGDVNGHKFSVSGEGEGDATYGKLTLKFICTTGKLPVPWPTLVTTLTYGVQCFSRYPDHMKQHDFFKSAMPEGYVQERTIFFKDDGNYKTRAEVKFEGDTLVNRIELKGIDFKEDGNILGHKLEYNYNSHNVYIMADKQKNGIKVNFKIRHNIEDGSVQLADHYQQNTPIGDGPVLLPDNHYLSTQSALSKDPNEKRDHMVLLEFVTAAGITLGMDELYK

SEQ ID NO: 119 - protein, 1565 aa, synthetic construct
  REGION 1..1565: note = SYNTHETIC
MTQFEGFTNLYQVSKTLRFELIPQGKTLKHIQEQGFIEEDKARNDHYKELKPIIDRIYKTYADQCLQLVQLDWENLSAAIDSYRKEKTEETRNALIEEQATYRNAIHDYFIGRTDNLTDAINKRHAEIYKGLFKAELFNGKVLKQLGTVTTTEHENALLRSFDKFTTYFSGFYENRKNVFSAEDISTAIPHRIVQDNFPKFKENCHIFTRLITAVPSLREHFENVKKAIGIFVSTSIEEVFSFPFYNQLLTQTQIDLYNQLLGGISREAGTEKIKGLNEVLNLAIQKNDETAHIIASLPHRFIPLFKQILSDRNTLSFILEEFKSDEEVIQSFCKYKTLLRNENVLETAEALFNELNSIDLTHIFISHKKLETISSALCDHWDTLRNALYERRISELTGKITKSAKEKVQRSLKHEDINLQEIISAAGKELSEAFKQKTSEILSHAHAALDQPLPTTLKKQEEKEILKSQLDSLLGLYHLLDWFAVDESNEVDPEFSARLTGIKLEMEPSLSFYNKARNYATKKPYSVEKFKLNFQMPTLASGWDVNKEKNNGAILFVKNGLYYLGIMPKQKGRYKALSFEPTEKTSEGFDKMYYDYFPDAAKMIPKCSTQLKAVTAHFQTHTTPILLSNNFIEPLEITKEIYDLNNPEKEPKKFQTAYAKKTGDQKGYREALCKWIDFTRDFLSKYTKTTSIDLSSLRPSSQYKDLGEYYAELNPLLYHISFQRIAEKEIMDAVETGKLYLFQIYNKDFAKGHHGKPNLHTLYWTGLFSPENLAKTSIKLNGQAELFYRPKSRMKRMAHRLGEKMLNKKLKDQKTPIPDTLYQELYDYVNHRLSHDLSDEARALLPNVITKEVSHEIIKDRRFTSDKFFFHVPITLNYQAANSPSKFNQRVNAYLKEHPETPIIGIDRGERNLIYITVIDSTGKILEQRSLNTIQQFDYQKKLDNREKERVAARQAWSVVGTIKDLKQGYLSQVIHEIVDLMIHYQAVVVLENLNFGFKSKRTGIAEKAVYQQFEKMLIDKLNCLVLKDYPAEKVGGVLNPYQLTDQFTSFAKMGTQSGFLFYVPAPYTSKIDPLTGFVDPFVWKTIKNHESRKHFLEGFDFLHYDVKTGDFILHFKMNRNLSFQRGLPGFMPAWDIVFEKNETQFDAKGTPFIAGKRIVPVIENHRFTGRYRDLYPANELIALLEEKGIVFRDGSNILPKLLENDDSHAIDTMVALIRSVLQMRNSNAATGEDYINSPVRDLNGVCFDSRFQNPEWPMDADANGAYHIALKGQLLLNHLKESKDLKLQNGISNQDWLAYIQELRNAPAPAPAPAPAPAPAPAPAMVSKGEELFTGVVPILVELDGDVNGHKFSVSGEGEGDATYGKLTLKFICTTGKLPVPWPTLVTTLTYGVQCFSRYPDHMKQHDFFKSAMPEGYVQERTIFFKDDGNYKTRAEVKFEGDTLVNRIELKGIDFKEDGNILGHKLEYNYNSHNVYIMADKQKNGIKVNFKIRHNIEDGSVQLADHYQQNTPIGDGPVLLPDNHYLSTQSALSKDPNEKRDHMVLLEFVTAAGITLGMDELYK

SEQ ID NO: 120 - protein, 1567 aa, synthetic construct
  REGION 1..1567: note = SYNTHETIC
MTQFEGFTNLYQVSKTLRFELIPQGKTLKHIQEQGFIEEDKARNDHYKELKPIIDRIYKTYADQCLQLVQLDWENLSAAIDSYRKEKTEETRNALIEEQATYRNAIHDYFIGRTDNLTDAINKRHAEIYKGLFKAELFNGKVLKQLGTVTTTEHENALLRSFDKFTTYFSGFYENRKNVFSAEDISTAIPHRIVQDNFPKFKENCHIFTRLITAVPSLREHFENVKKAIGIFVSTSIEEVFSFPFYNQLLTQTQIDLYNQLLGGISREAGTEKIKGLNEVLNLAIQKNDETAHIIASLPHRFIPLFKQILSDRNTLSFILEEFKSDEEVIQSFCKYKTLLRNENVLETAEALFNELNSIDLTHIFISHKKLETISSALCDHWDTLRNALYERRISELTGKITKSAKEKVQRSLKHEDINLQEIISAAGKELSEAFKQKTSEILSHAHAALDQPLPTTLKKQEEKEILKSQLDSLLGLYHLLDWFAVDESNEVDPEFSARLTGIKLEMEPSLSFYNKARNYATKKPYSVEKFKLNFQMPTLASGWDVNKEKNNGAILFVKNGLYYLGIMPKQKGRYKALSFEPTEKTSEGFDKMYYDYFPDAAKMIPKCSTQLKAVTAHFQTHTTPILLSNNFIEPLEITKEIYDLNNPEKEPKKFQTAYAKKTGDQKGYREALCKWIDFTRDFLSKYTKTTSIDLSSLRPSSQYKDLGEYYAELNPLLYHISFQRIAEKEIMDAVETGKLYLFQIYNKDFAKGHHGKPNLHTLYWTGLFSPENLAKTSIKLNGQAELFYRPKSRMKRMAHRLGEKMLNKKLKDQKTPIPDTLYQELYDYVNHRLSHDLSDEARALLPNVITKEVSHEIIKDRRFTSDKFFFHVPITLNYQAANSPSKFNQRVNAYLKEHPETPIIGIDRGERNLIYITVIDSTGKILEQRSLNTIQQFDYQKKLDNREKERVAARQAWSVVGTIKDLKQGYLSQVIHEIVDLMIHYQAVVVLENLNFGFKSKRTGIAEKAVYQQFEKMLIDKLNCLVLKDYPAEKVGGVLNPYQLTDQFTSFAKMGTQSGFLFYVPAPYTSKIDPLTGFVDPFVWKTIKNHESRKHFLEGFDFLHYDVKTGDFILHFKMNRNLSFQRGLPGFMPAWDIVFEKNETQFDAKGTPFIAGKRIVPVIENHRFTGRYRDLYPANELIALLEEKGIVFRDGSNILPKLLENDDSHAIDTMVALIRSVLQMRNSNAATGEDYINSPVRDLNGVCFDSRFQNPEWPMDADANGAYHIALKGQLLLNHLKESKDLKLQNGISNQDWLAYIQELRNAPAPAPAPAPAPAPAPAPAPAMVSKGEELFTGVVPILVELDGDVNGHKFSVSGEGEGDATYGKLTLKFICTTGKLPVPWPTLVTTLTYGVQCFSRYPDHMKQHDFFKSAMPEGYVQERTIFFKDDGNYKTRAEVKFEGDTLVNRIELKGIDFKEDGNILGHKLEYNYNSHNVYIMADKQKNGIKVNFKIRHNIEDGSVQLADHYQQNTPIGDGPVLLPDNHYLSTQSALSKDPNEKRDHMVLLEFVTAAGITLGMDELYK

SEQ ID NO: 121 - protein, 1569 aa, synthetic construct
  REGION 1..1569: note = SYNTHETIC
MTQFEGFTNLYQVSKTLRFELIPQGKTLKHIQEQGFIEEDKARNDHYKELKPIIDRIYKTYADQCLQLVQLDWENLSAAIDSYRKEKTEETRNALIEEQATYRNAIHDYFIGRTDNLTDAINKRHAEIYKGLFKAELFNGKVLKQLGTVTTTEHENALLRSFDKFTTYFSGFYENRKNVFSAEDISTAIPHRIVQDNFPKFKENCHIFTRLITAVPSLREHFENVKKAIGIFVSTSIEEVFSFPFYNQLLTQTQIDLYNQLLGGISREAGTEKIKGLNEVLNLAIQKNDETAHIIASLPHRFIPLFKQILSDRNTLSFILEEFKSDEEVIQSFCKYKTLLRNENVLETAEALFNELNSIDLTHIFISHKKLETISSALCDHWDTLRNALYERRISELTGKITKSAKEKVQRSLKHEDINLQEIISAAGKELSEAFKQKTSEILSHAHAALDQPLPTTLKKQEEKEILKSQLDSLLGLYHLLDWFAVDESNEVDPEFSARLTGIKLEMEPSLSFYNKARNYATKKPYSVEKFKLNFQMPTLASGWDVNKEKNNGAILFVKNGLYYLGIMPKQKGRYKALSFEPTEKTSEGFDKMYYDYFPDAAKMIPKCSTQLKAVTAHFQTHTTPILLSNNFIEPLEITKEIYDLNNPEKEPKKFQTAYAKKTGDQKGYREALCKWIDFTRDFLSKYTKTTSIDLSSLRPSSQYKDLGEYYAELNPLLYHISFQRIAEKEIMDAVETGKLYLFQIYNKDFAKGHHGKPNLHTLYWTGLFSPENLAKTSIKLNGQAELFYRPKSRMKRMAHRLGEKMLNKKLKDQKTPIPDTLYQELYDYVNHRLSHDLSDEARALLPNVITKEVSHEIIKDRRFTSDKFFFHVPITLNYQAANSPSKFNQRVNAYLKEHPETPIIGIDRGERNLIYITVIDSTGKILEQRSLNTIQQFDYQKKLDNREKERVAARQAWSVVGTIKDLKQGYLSQVIHEIVDLMIHYQAVVVLENLNFGFKSKRTGIAEKAVYQQFEKMLIDKLNCLVLKDYPAEKVGGVLNPYQLTDQFTSFAKMGTQSGFLFYVPAPYTSKIDPLTGFVDPFVWKTIKNHESRKHFLEGFDFLHYDVKTGDFILHFKMNRNLSFQRGLPGFMPAWDIVFEKNETQFDAKGTPFIAGKRIVPVIENHRFTGRYRDLYPANELIALLEEKGIVFRDGSNILPKLLENDDSHAIDTMVALIRSVLQMRNSNAATGEDYINSPVRDLNGVCFDSRFQNPEWPMDADANGAYHIALKGQLLLNHLKESKDLKLQNGISNQDWLAYIQELRNAPAPAPAPAPAPAPAPAPAPAPAMVSKGEELFTGVVPILVELDGDVNGHKFSVSGEGEGDATYGKLTLKFICTTGKLPVPWPTLVTTLTYGVQCFSRYPDHMKQHDFFKSAMPEGYVQERTIFFKDDGNYKTRAEVKFEGDTLVNRIELKGIDFKEDGNILGHKLEYNYNSHNVYIMADKQKNGIKVNFKIRHNIEDGSVQLADHYQQNTPIGDGPVLLPDNHYLSTQSALSKDPNEKRDHMVLLEFVTAAGITLGMDELYK

SEQ ID NO: 122 - protein, 1571 aa, synthetic construct
  REGION 1..1571: note = SYNTHETIC
MTQFEGFTNLYQVSKTLRFELIPQGKTLKHIQEQGFIEEDKARNDHYKELKPIIDRIYKTYADQCLQLVQLDWENLSAAIDSYRKEKTEETRNALIEEQATYRNAIHDYFIGRTDNLTDAINKRHAEIYKGLFKAELFNGKVLKQLGTVTTTEHENALLRSFDKFTTYFSGFYENRKNVFSAEDISTAIPHRIVQDNFPKFKENCHIFTRLITAVPSLREHFENVKKAIGIFVSTSIEEVFSFPFYNQLLTQTQIDLYNQLLGGISREAGTEKIKGLNEVLNLAIQKNDETAHIIASLPHRFIPLFKQILSDRNTLSFILEEFKSDEEVIQSFCKYKTLLRNENVLETAEALFNELNSIDLTHIFISHKKLETISSALCDHWDTLRNALYERRISELTGKITKSAKEKVQRSLKHEDINLQEIISAAGKELSEAFKQKTSEILSHAHAALDQPLPTTLKKQEEKEILKSQLDSLLGLYHLLDWFAVDESNEVDPEFSARLTGIKLEMEPSLSFYNKARNYATKKPYSVEKFKLNFQMPTLASGWDVNKEKNNGAILFVKNGLYYLGIMPKQKGRYKALSFEPTEKTSEGFDKMYYDYFPDAAKMIPKCSTQLKAVTAHFQTHTTPILLSNNFIEPLEITKEIYDLNNPEKEPKKFQTAYAKKTGDQKGYREALCKWIDFTRDFLSKYTKTTSIDLSSLRPSSQYKDLGEYYAELNPLLYHISFQRIAEKEIMDAVETGKLYLFQIYNKDFAKGHHGKPNLHTLYWTGLFSPENLAKTSIKLNGQAELFYRPKSRMKRMAHRLGEKMLNKKLKDQKTPIPDTLYQELYDYVNHRLSHDLSDEARALLPNVITKEVSHEIIKDRRFTSDKFFFHVPITLNYQAANSPSKFNQRVNAYLKEHPETPIIGIDRGERNLIYITVIDSTGKILEQRSLNTIQQFDYQKKLDNREKERVAARQAWSVVGTIKDLKQGYLSQVIHEIVDLMIHYQAVVVLENLNFGFKSKRTGIAEKAVYQQFEKMLIDKLNCLVLKDYPAEKVGGVLNPYQLTDQFTSFAKMGTQSGFLFYVPAPYTSKIDPLTGFVDPFVWKTIKNHESRKHFLEGFDFLHYDVKTGDFILHFKMNRNLSFQRGLPGFMPAWDIVFEKNETQFDAKGTPFIAGKRIVPVIENHRFTGRYRDLYPANELIALLEEKGIVFRDGSNILPKLLENDDSHAIDTMVALIRSVLQMRNSNAATGEDYINSPVRDLNGVCFDSRFQNPEWPMDADANGAYHIALKGQLLLNHLKESKDLKLQNGISNQDWLAYIQELRNAPAPAPAPAPAPAPAPAPAPAPAPAMVSKGEELFTGVVPILVELDGDVNGHKFSVSGEGEGDATYGKLTLKFICTTGKLPVPWPTLVTTLTYGVQCFSRYPDHMKQHDFFKSAMPEGYVQERTIFFKDDGNYKTRAEVKFEGDTLVNRIELKGIDFKEDGNILGHKLEYNYNSHNVYIMADKQKNGIKVNFKIRHNIEDGSVQLADHYQQNTPIGDGPVLLPDNHYLSTQSALSKDPNEKRDHMVLLEFVTAAGITLGMDELYK

SEQ ID NO: 123 - protein, 1573 aa, synthetic construct
  REGION 1..1573: note = SYNTHETIC
MTQFEGFTNLYQVSKTLRFELIPQGKTLKHIQEQGFIEEDKARNDHYKELKPIIDRIYKTYADQCLQLVQLDWENLSAAIDSYRKEKTEETRNALIEEQATYRNAIHDYFIGRTDNLTDAINKRHAEIYKGLFKAELFNGKVLKQLGTVTTTEHENALLRSFDKFTTYFSGFYENRKNVFSAEDISTAIPHRIVQDNFPKFKENCHIFTRLITAVPSLREHFENVKKAIGIFVSTSIEEVFSFPFYNQLLTQTQIDLYNQLLGGISREAGTEKIKGLNEVLNLAIQKNDETAHIIASLPHRFIPLFKQILSDRNTLSFILEEFKSDEEVIQSFCKYKTLLRNENVLETAEALFNELNSIDLTHIFISHKKLETISSALCDHWDTLRNALYERRISELTGKITKSAKEKVQRSLKHEDINLQEIISAAGKELSEAFKQKTSEILSHAHAALDQPLPTTLKKQEEKEILKSQLDSLLGLYHLLDWFAVDESNEVDPEFSARLTGIKLEMEPSLSFYNKARNYATKKPYSVEKFKLNFQMPTLASGWDVNKEKNNGAILFVKNGLYYLGIMPKQKGRYKALSFEPTEKTSEGFDKMYYDYFPDAAKMIPKCSTQLKAVTAHFQTHTTPILLSNNFIEPLEITKEIYDLNNPEKEPKKFQTAYAKKTGDQKGYREALCKWIDFTRDFLSKYTKTTSIDLSSLRPSSQYKDLGEYYAELNPLLYHISFQRIAEKEIMDAVETGKLYLFQIYNKDFAKGHHGKPNLHTLYWTGLFSPENLAKTSIKLNGQAELFYRPKSRMKRMAHRLGEKMLNKKLKDQKTPIPDTLYQELYDYVNHRLSHDLSDEARALLPNVITKEVSHEIIKDRRFTSDKFFFHVPITLNYQAANSPSKFNQRVNAYLKEHPETPIIGIDRGERNLIYITVIDSTGKILEQRSLNTIQQFDYQKKLDNREKERVAARQAWSVVGTIKDLKQGYLSQVIHEIVDLMIHYQAVVVLENLNFGFKSKRTGIAEKAVYQQFEKMLIDKLNCLVLKDYPAEKVGGVLNPYQLTDQFTSFAKMGTQSGFLFYVPAPYTSKIDPLTGFVDPFVWKTIKNHESRKHFLEGFDFLHYDVKTGDFILHFKMNRNLSFQRGLPGFMPAWDIVFEKNETQFDAKGTPFIAGKRIVPVIENHRFTGRYRDLYPANELIALLEEKGIVFRDGSNILPKLLENDDSHAIDTMVALIRSVLQMRNSNAATGEDYINSPVRDLNGVCFDSRFQNPEWPMDADANGAYHIALKGQLLLNHLKESKDLKLQNGISNQDWLAYIQELRNAPAPAPAPAPAPAPAPAPAPAPAPAPAMVSKGEELFTGVVPILVELDGDVNGHKFSVSGEGEGDATYGKLTLKFICTTGKLPVPWPTLVTTLTYGVQCFSRYPDHMKQHDFFKSAMPEGYVQERTIFFKDDGNYKTRAEVKFEGDTLVNRIELKGIDFKEDGNILGHKLEYNYNSHNVYIMADKQKNGIKVNFKIRHNIEDGSVQLADHYQQNTPIGDGPVLLPDNHYLSTQSALSKDPNEKRDHMVLLEFVTAAGITLGMDELYK

SEQ ID NO: 124 - protein, 1575 aa, synthetic construct
  REGION 1..1575: note = SYNTHETIC
MTQFEGFTNLYQVSKTLRFELIPQGKTLKHIQEQGFIEEDKARNDHYKELKPIIDRIYKTYADQCLQLVQLDWENLSAAIDSYRKEKTEETRNALIEEQATYRNAIHDYFIGRTDNLTDAINKRHAEIYKGLFKAELFNGKVLKQLGTVTTTEHENALLRSFDKFTTYFSGFYENRKNVFSAEDISTAIPHRIVQDNFPKFKENCHIFTRLITAVPSLREHFENVKKAIGIFVSTSIEEVFSFPFYNQLLTQTQIDLYNQLLGGISREAGTEKIKGLNEVLNLAIQKNDETAHIIASLPHRFIPLFKQILSDRNTLSFILEEFKSDEEVIQSFCKYKTLLRNENVLETAEALFNELNSIDLTHIFISHKKLETISSALCDHWDTLRNALYERRISELTGKITKSAKEKVQRSLKHEDINLQEIISAAGKELSEAFKQKTSEILSHAHAALDQPLPTTLKKQEEKEILKSQLDSLLGLYHLLDWFAVDESNEVDPEFSARLTGIKLEMEPSLSFYNKARNYATKKPYSVEKFKLNFQMPTLASGWDVNKEKNNGAILFVKNGLYYLGIMPKQKGRYKALSFEPTEKTSEGFDKMYYDYFPDAAKMIPKCSTQLKAVTAHFQTHTTPILLSNNFIEPLEITKEIYDLNNPEKEPKKFQTAYAKKTGDQKGYREALCKWIDFTRDFLSKYTKTTSIDLSSLRPSSQYKDLGEYYAELNPLLYHISFQRIAEKEIMDAVETGKLYLFQIYNKDFAKGHHGKPNLHTLYWTGLFSPENLAKTSIKLNGQAELFYRPKSRMKRMAHRLGEKMLNKKLKDQKTPIPDTLYQELYDYVNHRLSHDLSDEARALLPNVITKEVSHEIIKDRRFTSDKFFFHVPITLNYQAANSPSKFNQRVNAYLKEHPETPIIGIDRGERNLIYITVIDSTGKILEQRSLNTIQQFDYQKKLDNREKERVAARQAWSVVGTIKDLKQGYLSQVIHEIVDLMIHYQAVVVLENLNFGFKSKRTGIAEKAVYQQFEKMLIDKLNCLVLKDYPAEKVGGVLNPYQLTDQFTSFAKMGTQSGFLFYVPAPYTSKIDPLTGFVDPFVWKTIKNHESRKHFLEGFDFLHYDVKTGDFILHFKMNRNLSFQRGLPGFMPAWDIVFEKNETQFDAKGTPFIAGKRIVPVIENHRFTGRYRDLYPANELIALLEEKGIVFRDGSNILPKLLENDDSHAIDTMVALIRSVLQMRNSNAATGEDYINSPVRDLNGVCFDSRFQNPEWPMDADANGAYHIALKGQLLLNHLKESKDLKLQNGISNQDWLAYIQELRNAPAPAPAPAPAPAPAPAPAPAPAPAPAPAMVSKGEELFTGVVPILVELDGDVNGHKFSVSGEGEGDATYGKLTLKFICTTGKLPVPWPTLVTTLTYGVQCFSRYPDHMKQHDFFKSAMPEGYVQERTIFFKDDGNYKTRAEVKFEGDTLVNRIELKGIDFKEDGNILGHKLEYNYNSHNVYIMADKQKNGIKVNFKIRHNIEDGSVQLADHYQQNTPIGDGPVLLPDNHYLSTQSALSKDPNEKRDHMVLLEFVTAAGITLGMDELYK

SEQ ID NO: 125 - protein, 1548 aa, synthetic construct
  REGION 1..1548: note = SYNTHETIC
  VARIANT 1308: note = X can be any naturally occurring amino acid
MTQFEGFTNLYQVSKTLRFELIPQGKTLKHIQEQGFIEEDKARNDHYKELKPIIDRIYKTYADQCLQLVQLDWENLSAAIDSYRKEKTEETRNALIEEQATYRNAIHDYFIGRTDNLTDAINKRHAEIYKGLFKAELFNGKVLKQLGTVTTTEHENALLRSFDKFTTYFSGFYENRKNVFSAEDISTAIPHRIVQDNFPKFKENCHIFTRLITAVPSLREHFENVKKAIGIFVSTSIEEVFSFPFYNQLLTQTQIDLYNQLLGGISREAGTEKIKGLNEVLNLAIQKNDETAHIIASLPHRFIPLFKQILSDRNTLSFILEEFKSDEEVIQSFCKYKTLLRNENVLETAEALFNELNSIDLTHIFISHKKLETISSALCDHWDTLRNALYERRISELTGKITKSAKEKVQRSLKHEDINLQEIISAAGKELSEAFKQKTSEILSHAHAALDQPLPTTLKKQEEKEILKSQLDSLLGLYHLLDWFAVDESNEVDPEFSARLTGIKLEMEPSLSFYNKARNYATKKPYSVEKFKLNFQMPTLASGWDVNKEKNNGAILFVKNGLYYLGIMPKQKGRYKALSFEPTEKTSEGFDKMYYDYFPDAAKMIPKCSTQLKAVTAHFQTHTTPILLSNNFIEPLEITKEIYDLNNPEKEPKKFQTAYAKKTGDQKGYREALCKWIDFTRDFLSKYTKTTSIDLSSLRPSSQYKDLGEYYAELNPLLYHISFQRIAEKEIMDAVETGKLYLFQIYNKDFAKGHHGKPNLHTLYWTGLFSPENLAKTSIKLNGQAELFYRPKSRMKRMAHRLGEKMLNKKLKDQKTPIPDTLYQELYDYVNHRLSHDLSDEARALLPNVITKEVSHEIIKDRRFTSDKFFFHVPITLNYQAANSPSKFNQRVNAYLKEHPETPIIGIDRGERNLIYITVIDSTGKILEQRSLNTIQQFDYQKKLDNREKERVAARQAWSVVGTIKDLKQGYLSQVIHEIVDLMIHYQAVVVLENLNFGFKSKRTGIAEKAVYQQFEKMLIDKLNCLVLKDYPAEKVGGVLNPYQLTDQFTSFAKMGTQSGFLFYVPAPYTSKIDPLTGFVDPFVWKTIKNHESRKHFLEGFDFLHYDVKTGDFILHFKMNRNLSFQRGLPGFMPAWDIVFEKNETQFDAKGTPFIAGKRIVPVIENHRFTGRYRDLYPANELIALLEEKGIVFRDGSNILPKLLENDDSHAIDTMVALIRSVLQMRNSNAATGEDYINSPVRDLNGVCFDSRFQNPEWPMDADANGAYHIALKGQLLLNHLKESKDLKLQNGISNQDWLAYIQELRNXPMVSKGEELFTGVVPILVELDGDVNGHKFSVSGEGEGDATYGKLTLKFICTTGKLPVPWPTLVTTLTYGVQCFSRYPDHMKQHDFFKSAMPEGYVQERTIFFKDDGNYKTRAEVKFEGDTLVNRIELKGIDFKEDGNILGHKLEYNYNSHNVYIMADKQKNGIKVNFKIRHNIEDGSVQLADHYQQNTPIGDGPVLLPDNHYLSTQSALSKDPNEKRDHMVLLEFVTAAGITLGMDELYK

SEQ ID NO: 126 - protein, 1550 aa, synthetic construct
  REGION 1..1550: note = SYNTHETIC
  VARIANT 1308: note = X can be any naturally occurring amino acid
  VARIANT 1310: note = X can be any naturally occurring amino acid
MTQFEGFTNLYQVSKTLRFELIPQGKTLKHIQEQGFIEEDKARNDHYKELKPIIDRIYKTYADQCLQLVQLDWENLSAAIDSYRKEKTEETRNALIEEQATYRNAIHDYFIGRTDNLTDAINKRHAEIYKGLFKAELFNGKVLKQLGTVTTTEHENALLRSFDKFTTYFSGFYENRKNVFSAEDISTAIPHRIVQDNFPKFKENCHIFTRLITAVPSLREHFENVKKAIGIFVSTSIEEVFSFPFYNQLLTQTQIDLYNQLLGGISREAGTEKIKGLNEVLNLAIQKNDETAHIIASLPHRFIPLFKQILSDRNTLSFILEEFKSDEEVIQSFCKYKTLLRNENVLETAEALFNELNSIDLTHIFISHKKLETISSALCDHWDTLRNALYERRISELTGKITKSAKEKVQRSLKHEDINLQEIISAAGKELSEAFKQKTSEILSHAHAALDQPLPTTLKKQEEKEILKSQLDSLLGLYHLLDWFAVDESNEVDPEFSARLTGIKLEMEPSLSFYNKARNYATKKPYSVEKFKLNFQMPTLASGWDVNKEKNNGAILFVKNGLYYLGIMPKQKGRYKALSFEPTEKTSEGFDKMYYDYFPDAAKMIPKCSTQLKAVTAHFQTHTTPILLSNNFIEPLEITKEIYDLNNPEKEPKKFQTAYAKKTGDQKGYREALCKWIDFTRDFLSKYTKTTSIDLSSLRPSSQYKDLGEYYAELNPLLYHISFQRIAEKEIMDAVETGKLYLFQIYNKDFAKGHHGKPNLHTLYWTGLFSPENLAKTSIKLNGQAELFYRPKSRMKRMAHRLGEKMLNKKLKDQKTPIPDTLYQELYDYVNHRLSHDLSDEARALLPNVITKEVSHEIIKDRRFTSDKFFFHVPITLNYQAANSPSKFNQRVNAYLKEHPETPIIGIDRGERNLIYITVIDSTGKILEQRSLNTIQQFDYQKKLDNREKERVAARQAWSVVGTIKDLKQGYLSQVIHEIVDLMIHYQAVVVLENLNFGFKSKRTGIAEKAVYQQFEKMLIDKLNCLVLKDYPAEKVGGVLNPYQLTDQFTSFAKMGTQSGFLFYVPAPYTSKIDPLTGFVDPFVWKTIKNHESRKHFLEGFDFLHYDVKTGDFILHFKMNRNLSFQRGLPGFMPAWDIVFEKNETQFDAKGTPFIAGKRIVPVIENHRFTGRYRDLYPANELIALLEEKGIVFRDGSNILPKLLENDDSHAIDTMVALIRSVLQMRNSNAATGEDYINSPVRDLNGVCFDSRFQNPEWPMDADANGAYHIALKGQLLLNHLKESKDLKLQNGISNQDWLAYIQELRNXPXPMVSKGEELFTGVVPILVELDGDVNGHKFSVSGEGEGDATYGKLTLKFICTTGKLPVPWPTLVTTLTYGVQCFSRYPDHMKQHDFFKSAMPEGYVQERTIFFKDDGNYKTRAEVKFEGDTLVNRIELKGIDFKEDGNILGHKLEYNYNSHNVYIMADKQKNGIKVNFKIRHNIEDGSVQLADHYQQNTPIGDGPVLLPDNHYLSTQSALSKDPNEKRDHMVLLEFVTAAGITLGMDELYK

SEQ ID NO: 127 - protein, 1552 aa, synthetic construct
  REGION 1..1552: note = SYNTHETIC
  VARIANT 1308: note = X can be any naturally occurring amino acid
  VARIANT 1310: note = X can be any naturally occurring amino acid
  VARIANT 1312: note = X can be any naturally occurring amino acid
MTQFEGFTNLYQVSKTLRFELIPQGKTLKHIQEQGFIEEDKARNDHYKELKPIIDRIYKTYADQCLQLVQLDWENLSAAIDSYRKEKTEETRNALIEEQATYRNAIHDYFIGRTDNLTDAINKRHAEIYKGLFKAELFNGKVLKQLGTVTTTEHENALLRSFDKFTTYFSGFYENRKNVFSAEDISTAIPHRIVQDNFPKFKENCHIFTRLITAVPSLREHFENVKKAIGIFVSTSIEEVFSFPFYNQLLTQTQIDLYNQLLGGISREAGTEKIKGLNEVLNLAIQKNDETAHIIASLPHRFIPLFKQILSDRNTLSFILEEFKSDEEVIQSFCKYKTLLRNENVLETAEALFNELNSIDLTHIFISHKKLETISSALCDHWDTLRNALYERRISELTGKITKSAKEKVQRSLKHEDINLQEIISAAGKELSEAFKQKTSEILSHAHAALDQPLPTTLKKQEEKEILKSQLDSLLGLYHLLDWFAVDESNEVDPEFSARLTGIKLEMEPSLSFYNKARNYATKKPYSVEKFKLNFQMPTLASGWDVNKEKNNGAILFVKNGLYYLGIMPKQKGRYKALSFEPTEKTSEGFDKMYYDYFPDAAKMIPKCSTQLKAVTAHFQTHTTPILLSNNFIEPLEITKEIYDLNNPEKEPKKFQTAYAKKTGDQKGYREALCKWIDFTRDFLSKYTKTTSIDLSSLRPSSQYKDLGEYYAELNPLLYHISFQRIAEKEIMDAVETGKLYLFQIYNKDFAKGHHGKPNLHTLYWTGLFSPENLAKTSIKLNGQAELFYRPKSRMKRMAHRLGEKMLNKKLKDQKTPIPDTLYQELYDYVNHRLSHDLSDEARALLPNVITKEVSHEIIKDRRFTSDKFFFHVPITLNYQAANSPSKFNQRVNAYLKEHPETPIIGIDRGERNLIYITVIDSTGKILEQRSLNTIQQFDYQKKLDNREKERVAARQAWSVVGTIKDLKQGYLSQVIHEIVDLMIHYQAVVVLENLNFGFKSKRTGIAEKAVYQQFEKMLIDKLNCLVLKDYPAEKVGGVLNPYQLTDQFTSFAKMGTQSGFLFYVPAPYTSKIDPLTGFVDPFVWKTIKNHESRKHFLEGFDFLHYDVKTGDFILHFKMNRNLSFQRGLPGFMPAWDIVFEKNETQFDAKGTPFIAGKRIVPVIENHRFTGRYRDLYPANELIALLEEKGIVFRDGSNILPKLLENDDSHAIDTMVALIRSVLQMRNSNAATGEDYINSPVRDLNGVCFDSRFQNPEWPMDADANGAYHIALKGQLLLNHLKESKDLKLQNGISNQDWLAYIQELRNXPXPXPMVSKGEELFTGVVPILVELDGDVNGHKFSVSGEGEGDATYGKLTLKFICTTGKLPVPWPTLVTTLTYGVQCFSRYPDHMKQHDFFKSAMPEGYVQERTIFFKDDGNYKTRAEVKFEGDTLVNRIELKGIDFKEDGNILGHKLEYNYNSHNVYIMADKQKNGIKVNFKIRHNIEDGSVQLADHYQQNTPIGDGPVLLPDNHYLSTQSALSKDPNEKRDHMVLLEFVTAAGITLGMDELYK

SEQ ID NO: 128 - protein, 1554 aa, synthetic construct
  REGION 1..1554: note = SYNTHETIC
  VARIANT 1308: note = X can be any naturally occurring amino acid
  VARIANT 1310: note = X can be any naturally occurring amino acid
  VARIANT 1312: note = X can be any naturally occurring amino acid
  VARIANT 1314: note = X can be any naturally occurring amino acid
MTQFEGFTNLYQVSKTLRFELIPQGKTLKHIQEQGFIEEDKARNDHYKELKPIIDRIYKTYADQCLQLVQLDWENLSAAIDSYRKEKTEETRNALIEEQATYRNAIHDYFIGRTDNLTDAINKRHAEIYKGLFKAELFNGKVLKQLGTVTTTEHENALLRSFDKFTTYFSGFYENRKNVFSAEDISTAIPHRIVQDNFPKFKENCHIFTRLITAVPSLREHFENVKKAIGIFVSTSIEEVFSFPFYNQLLTQTQIDLYNQLLGGISREAGTEKIKGLNEVLNLAIQKNDETAHIIASLPHRFIPLFKQILSDRNTLSFILEEFKSDEEVIQSFCKYKTLLRNENVLETAEALFNELNSIDLTHIFISHKKLETISSALCDHWDTLRNALYERRISELTGKITKSAKEKVQRSLKHEDINLQEIISAAGKELSEAFKQKTSEILSHAHAALDQPLPTTLKKQEEKEILKSQLDSLLGLYHLLDWFAVDESNEVDPEFSARLTGIKLEMEPSLSFYNKARNYATKKPYSVEKFKLNFQMPTLASGWDVNKEKNNGAILFVKNGLYYLGIMPKQKGRYKALSFEPTEKTSEGFDKMYYDYFPDAAKMIPKCSTQLKAVTAHFQTHTTPILLSNNFIEPLEITKEIYDLNNPEKEPKKFQTAYAKKTGDQKGYREALCKWIDFTRDFLSKYTKTTSIDLSSLRPSSQYKDLGEYYAELNPLLYHISFQRIAEKEIMDAVETGKLYLFQIYNKDFAKGHHGKPNLHTLYWTGLFSPENLAKTSIKLNGQAELFYRPKSRMKRMAHRLGEKMLNKKLKDQKTPIPDTLYQELYDYVNHRLSHDLSDEARALLPNVITKEVSHEIIKDRRFTSDKFFFHVPITLNYQAANSPSKFNQRVNAYLKEHPETPIIGIDRGERNLIYITVIDSTGKILEQRSLNTIQQFDYQKKLDNREKERVAARQAWSVVGTIKDLKQGYLSQVIHEIVDLMIHYQAVVVLENLNFGFKSKRTGIAEKAVYQQFEKMLIDKLNCLVLKDYPAEKVGGVLNPYQLTDQFTSFAKMGTQSGFLFYVPAPYTSKIDPLTGFVDPFVWKTIKNHESRKHFLEGFDFLHYDVKTGDFILHFKMNRNLSFQRGLPGFMPAWDIVFEKNETQFDAKGTPFIAGKRIVPVIENHRFTGRYRDLYPANELIALLEEKGIVFRDGSNILPKLLENDDSHAIDTMVALIRSVLQMRNSNAATGEDYINSPVRDLNGVCFDSRFQNPEWPMDADANGAYHIALKGQLLLNHLKESKDLKLQNGISNQDWLAYIQELRNXPXPXPXPMVSKGEELFTGVVPILVELDGDVNGHKFSVSGEGEGDATYGKLTLKFICTTGKLPVPWPTLVTTLTYGVQCFSRYPDHMKQHDFFKSAMPEGYVQERTIFFKDDGNYKTRAEVKFEGDTLVNRIELKGIDFKEDGNILGHKLEYNYNSHNVYIMADKQKNGIKVNFKIRHNIEDGSVQLADHYQQNTPIGDGPVLLPDNHYLSTQSALSKDPNEKRDHMVLLEFVTAAGITLGMDELYK

SEQ ID NO: 129 - protein, 1556 aa, synthetic construct
  REGION 1..1556: note = SYNTHETIC
  VARIANT 1308: note = X can be any naturally occurring amino acid
  VARIANT 1310: note = X can be any naturally occurring amino acid
  VARIANT 1312: note = X can be any naturally occurring amino acid
  VARIANT 1314: note = X can be any naturally occurring amino acid
  VARIANT 1316: note = X can be any naturally occurring amino acid
MTQFEGFTNLYQVSKTLRFELIPQGKTLKHIQEQGFIEEDKARNDHYKELKPIIDRIYKTYADQCLQLVQLDWENLSAAIDSYRKEKTEETRNALIEEQATYRNAIHDYFIGRTDNLTDAINKRHAEIYKGLFKAELFNGKVLKQLGTVTTTEHENALLRSFDKFTTYFSGFYENRKNVFSAEDISTAIPHRIVQDNFPKFKENCHIFTRLITAVPSLREHFENVKKAIGIFVSTSIEEVFSFPFYNQLLTQTQIDLYNQLLGGISREAGTEKIKGLNEVLNLAIQKNDETAHIIASLPHRFIPLFKQILSDRNTLSFILEEFKSDEEVIQSFCKYKTLLRNENVLETAEALFNELNSIDLTHIFISHKKLETISSALCDHWDTLRNALYERRISELTGKITKSAKEKVQRSLKHEDINLQEIISAAGKELSEAFKQKTSEILSHAHAALDQPLPTTLKKQEEKEILKSQLDSLLGLYHLLDWFAVDESNEVDPEFSARLTGIKLEMEPSLSFYNKARNYATKKPYSVEKFKLNFQMPTLASGWDVNKEKNNGAILFVKNGLYYLGIMPKQKGRYKALSFEPTEKTSEGFDKMYYDYFPDAAKMIPKCSTQLKAVTAHFQTHTTPILLSNNFIEPLEITKEIYDLNNPEKEPKKFQTAYAKKTGDQKGYREALCKWIDFTRDFLSKYTKTTSIDLSSLRPSSQYKDLGEYYAELNPLLYHISFQRIAEKEIMDAVETGKLYLFQIYNKDFAKGHHGKPNLHTLYWTGLFSPENLAKTSIKLNGQAELFYRPKSRMKRMAHRLGEKMLNKKLKDQKTPIPDTLYQELYDYVNHRLSHDLSDEARALLPNVITKEVSHEIIKDRRFTSDKFFFHVPITLNYQAANSPSKFNQRVNAYLKEHPETPIIGIDRGERNLIYITVIDSTGKILEQRSLNTIQQFDYQKKLDNREKERVAARQAWSVVGTIKDLKQGYLSQVIHEIVDLMIHYQAVVVLENLNFGFKSKRTGIAEKAVYQQFEKMLIDKLNCLVLKDYPAEKVGGVLNPYQLTDQFTSFAKMGTQSGFLFYVPAPYTSKIDPLTGFVDPFVWKTIKNHESRKHFLEGFDFLHYDVKTGDFILHFKMNRNLSFQRGLPGFMPAWDIVFEKNETQFDAKGTPFIAGKRIVPVIENHRFTGRYRDLYPANELIALLEEKGIVFRDGSNILPKLLENDDSHAIDTMVALIRSVLQMRNSNAATGEDYINSPVRDLNGVCFDSRFQNPEWPMDADANGAYHIALKGQLLLNHLKESKDLKLQNGISNQDWLAYIQELRNXPXPXPXPXPMVSKGEELFTGVVPILVELDGDVNGHKFSVSGEGEGDATYGKLTLKFICTTGKLPVPWPTLVTTLTYGVQCFSRYPDHMKQHDFFKSAMPEGYVQERTIFFKDDGNYKTRAEVKFEGDTLVNRIELKGIDFKEDGNILGHKLEYNYNSHNVYIMADKQKNGIKVNFKIRHNIEDGSVQLADHYQQNTPIGDGPVLLPDNHYLSTQSALSKDPNEKRDHMVLLEFVTAAGITLGMDELYK

SEQ ID NO: 130 - protein, 1558 aa, synthetic construct
  REGION 1..1558: note = SYNTHETIC
  VARIANT 1308: note = X can be any naturally occurring amino acid
  VARIANT 1310: note = X can be any naturally occurring amino acid
  VARIANT 1312: note = X can be any naturally occurring amino acid
  VARIANT 1314: note = X can be any naturally occurring amino acid
  VARIANT 1316: note = X can be any naturally occurring amino acid
  VARIANT 1318: note = X can be any naturally occurring amino acid
MTQFEGFTNLYQVSKTLRFELIPQGKTLKHIQEQGFIEEDKARNDHYKELKPIIDRIYKTYADQCLQLVQLDWENLSAAIDSYRKEKTEETRNALIEEQATYRNAIHDYFIGRTDNLTDAINKRHAEIYKGLFKAELFNGKVLKQLGTVTTTEHENALLRSFDKFTTYFSGFYENRKNVFSAEDISTAIPHRIVQDNFPKFKENCHIFTRLITAVPSLREHFENVKKAIGIFVSTSIEEVFSFPFYNQLLTQTQIDLYNQLLGGISREAGTEKIKGLNEVLNLAIQKNDETAHIIASLPHRFIPLFKQILSDRNTLSFILEEFKSDEEVIQSFCKYKTLLRNENVLETAEALFNELNSIDLTHIFISHKKLETISSALCDHWDTLRNALYERRISELTGKITKSAKEKVQRSLKHEDINLQEIISAAGKELSEAFKQKTSEILSHAHAALDQPLPTTLKKQEEKEILKSQLDSLLGLYHLLDWFAVDESNEVDPEFSARLTGIKLEMEPSLSFYNKARNYATKKPYSVEKFKLNFQMPTLASGWDVNKEKNNGAILFVKNGLYYLGIMPKQKGRYKALSFEPTEKTSEGFDKMYYDYFPDAAKMIPKCSTQLKAVTAHFQTHTTPILLSNNFIEPLEITKEIYDLNNPEKEPKKFQTAYAKKTGDQKGYREALCKWIDFTRDFLSKYTKTTSIDLSSLRPSSQYKDLGEYYAELNPLLYHISFQRIAEKEIMDAVETGKLYLFQIYNKDFAKGHHGKPNLHTLYWTGLFSPENLAKTSIKLNGQAELFYRPKSRMKRMAHRLGEKMLNKKLKDQKTPIPDTLYQELYDYVNHRLSHDLSDEARALLPNVITKEVSHEIIKDRRFTSDKFFFHVPITLNYQAANSPSKFNQRVNAYLKEHPETPIIGIDRGERNLIYITVIDSTGKILEQRSLNTIQQFDYQKKLDNREKERVAARQAWSVVGTIKDLKQGYLSQVIHEIVDLMIHYQAVVVLENLNFGFKSKRTGIAEKAVYQQFEKMLIDKLNCLVLKDYPAEKVGGVLNPYQLTDQFTSFAKMGTQSGFLFYVPAPYTSKIDPLTGFVDPFVWKTIKNHESRKHFLEGFDFLHYDVKTGDFILHFKMNRNLSFQRGLPGFMPAWDIVFEKNETQFDAKGTPFIAGKRIVPVIENHRFTGRYRDLYPANELIALLEEKGIVFRDGSNILPKLLENDDSHAIDTMVALIRSVLQMRNSNAATGEDYINSPVRDLNGVCFDSRFQNPEWPMDADANGAYHIALKGQLLLNHLKESKDLKLQNGISNQDWLAYIQELRNXPXPXPXPXPXPMVSKGEELFTGVVPILVELDGDVNGHKFSVSGEGEGDATYGKLTLKFICTTGKLPVPWPTLVTTLTYGVQCFSRYPDHMKQHDFFKSAMPEGYVQERTIFFKDDGNYKTRAEVKFEGDTLVNRIELKGIDFKEDGNILGHKLEYNYNSHNVYIMADKQKNGIKVNFKIRHNIEDGSVQLADHYQQNTPIGDGPVLLPDNHYLSTQSALSKDPNEKRDHMVLLEFVTAAGITLGMDELYK

SEQ ID NO: 131 - protein, 1560 aa, synthetic construct
  REGION 1..1560: note = SYNTHETIC
  VARIANT 1308: note = X can be any naturally occurring amino acid
  VARIANT 1310: note = X can be any naturally occurring amino acid
  VARIANT 1312: note = X can be any naturally occurring amino acid
  VARIANT 1314: note = X can be any naturally occurring amino acid
  VARIANT 1316: note = X can be any naturally occurring amino acid
  VARIANT 1318: note = X can be any naturally occurring amino acid
  VARIANT 1320: note = X can be any naturally occurring amino acid
MTQFEGFTNLYQVSKTLRFELIPQGKTLKHIQEQGFIEEDKARNDHYKELKPIIDRIYKTYADQCLQLVQLDWENLSAAIDSYRKEKTEETRNALIEEQATYRNAIHDYFIGRTDNLTDAINKRHAEIYKGLFKAELFNGKVLKQLGTVTTTEHENALLRSFDKFTTYFSGFYENRKNVFSAEDISTAIPHRIVQDNFPKFKENCHIFTRLITAVPSLREHFENVKKAIGIFVSTSIEEVFSFPFYNQLLTQTQIDLYNQLLGGISREAGTEKIKGLNEVLNLAIQKNDETAHIIASLPHRFIPLFKQILSDRNTLSFILEEFKSDEEVIQSFCKYKTLLRNENVLETAEALFNELNSIDLTHIFISHKKLETISSALCDHWDTLRNALYERRISELTGKITKSAKEKVQRSLKHEDINLQEIISAAGKELSEAFKQKTSEILSHAHAALDQPLPTTLKKQEEKEILKSQLDSLLGLYHLLDWFAVDESNEVDPEFSARLTGIKLEMEPSLSFYNKARNYATKKPYSVEKFKLNFQMPTLASGWDVNKEKNNGAILFVKNGLYYLGIMPKQKGRYKALSFEPTEKTSEGFDKMYYDYFPDAAKMIPKCSTQLKAVTAHFQTHTTPILLSNNFIEPLEITKEIYDLNNPEKEPKKFQTAYAKKTGDQKGYREALCKWIDFTRDFLSKYTKTTSIDLSSLRPSSQYKDLGEYYAELNPLLYHISFQRIAEKEIMDAVETGKLYLFQIYNKDFAKGHHGKPNLHTLYWTGLFSPENLAKTSIKLNGQAELFYRPKSRMKRMAHRLGEKMLNKKLKDQKTPIPDTLYQELYDYVNHRLSHDLSDEARALLPNVITKEVSHEIIKDRRFTSDKFFFHVPITLNYQAANSPSKFNQRVNAYLKEHPETPIIGIDRGERNLIYITVIDSTGKILEQRSLNTIQQFDYQKKLDNREKERVAARQAWSVVGTIKDLKQGYLSQVIHEIVDLMIHYQAVVVLENLNFGFKSKRTGIAEKAVYQQFEKMLIDKLNCLVLKDYPAEKVGGVLNPYQLTDQFTSFAKMGTQSGFLFYVPAPYTSKIDPLTGFVDPFVWKTIKNHESRKHFLEGFDFLHYDVKTGDFILHFKMNRNLSFQRGLPGFMPAWDIVFEKNETQFDAKGTPFIAGKRIVPVIENHRFTGRYRDLYPANELIALLEEKGIVFRDGSNILPKLLENDDSHAIDTMVALIRSVLQMRNSNAATGEDYINSPVRDLNGVCFDSRFQNPEWPMDADANGAYHIALKGQLLLNHLKESKDLKLQNGISNQDWLAYIQELRNXPXPXPXPXPXPXPMVSKGEELFTGVVPILVELDGDVNGHKFSVSGEGEGDATYGKLTLKFICTTGKLPVPWPTLVTTLTYGVQCFSRYPDHMKQHDFFKSAMPEGYVQERTIFFKDDGNYKTRAEVKFEGDTLVNRIELKGIDFKEDGNILGHKLEYNYNSHNVYIMADKQKNGIKVNFKIRHNIEDGSVQLADHYQQNTPIGDGPVLLPDNHYLSTQSALSKDPNEKRDHMVLLEFVTAAGITLGMDELYK

SEQ ID NO: 132 - protein, 1562 aa, synthetic construct
  REGION 1..1562: note = SYNTHETIC
  VARIANT 1308: note = X can be any naturally occurring amino acid
  VARIANT 1310: note = X can be any naturally occurring amino acid
  VARIANT 1312: note = X can be any naturally occurring amino acid
  VARIANT 1314: note = X can be any naturally occurring amino acid
  VARIANT 1316: note = X can be any naturally occurring amino acid
  VARIANT 1318: note = X can be any naturally occurring amino acid
  VARIANT 1320: note = X can be any naturally occurring amino acid
  VARIANT 1322: note = X can be any naturally occurring amino acid
MTQFEGFTNLYQVSKTLRFELIPQGKTLKHIQEQGFIEEDKARNDHYKELKPIIDRIYKTYADQCLQLVQLDWENLSAAIDSYRKEKTEETRNALIEEQATYRNAIHDYFIGRTDNLTDAINKRHAEIYKGLFKAELFNGKVLKQLGTVTTTEHENALLRSFDKFTTYFSGFYENRKNVFSAEDISTAIPHRIVQDNFPKFKENCHIFTRLITAVPSLREHFENVKKAIGIFVSTSIEEVFSFPFYNQLLTQTQIDLYNQLLGGISREAGTEKIKGLNEVLNLAIQKNDETAHIIASLPHRFIPLFKQILSDRNTLSFILEEFKSDEEVIQSFCKYKTLLRNENVLETAEALFNELNSIDLTHIFISHKKLETISSALCDHWDTLRNALYERRISELTGKITKSAKEKVQRSLKHEDINLQEIISAAGKELSEAFKQKTSEILSHAHAALDQPLPTTLKKQEEKEILKSQLDSLLGLYHLLDWFAVDESNEVDPEFSARLTGIKLEMEPSLSFYNKARNYATKKPYSVEKFKLNFQMPTLASGWDVNKEKNNGAILFVKNGLYYLGIMPKQKGRYKALSFEPTEKTSEGFDKMYYDYFPDAAKMIPKCSTQLKAVTAHFQTHTTPILLSNNFIEPLEITKEIYDLNNPEKEPKKFQTAYAKKTGDQKGYREALCKWIDFTRDFLSKYTKTTSIDLSSLRPSSQYKDLGEYYAELNPLLYHISFQRIAEKEIMDAVETGKLYLFQIYNKDFAKGHHGKPNLHTLYWTGLFSPENLAKTSIKLNGQAELFYRPKSRMKRMAHRLGEKMLNKKLKDQKTPIPDTLYQELYDYVNHRLSHDLSDEARALLPNVITKEVSHEIIKDRRFTSDKFFFHVPITLNYQAANSPSKFNQRVNAYLKEHPETPIIGIDRGERNLIYITVIDSTGKILEQRSLNTIQQFDYQKKLDNREKERVAARQAWSVVGTIKDLKQGYLSQVIHEIVDLMIHYQAVVVLENLNFGFKSKRTGIAEKAVYQQFEKMLIDKLNCLVLKDYPAEKVGGVLNPYQLTDQFTSFAKMGTQSGFLFYVPAPYTSKIDPLTGFVDPFVWKTIKNHESRKHFLEGFDFLHYDVKTGDFILHFKMNRNLSFQRGLPGFMPAWDIVFEKNETQFDAKGTPFIAGKRIVPVIENHRFTGRYRDLYPANELIALLEEKGIVFRDGSNILPKLLENDDSHAIDTMVALIRSVLQMRNSNAATGEDYINSPVRDLNGVCFDSRFQNPEWPMDADANGAYHIALKGQLLLNHLKESKDLKLQNGISNQDWLAYIQELRNXPXPXPXPXPXPXPXPMVSKGEELFTGVVPILVELDGDVNGHKFSVSGEGEGDATYGKLTLKFICTTGKLPVPWPTLVTTLTYGVQCFSRYPDHMKQHDFFKSAMPEGYVQERTIFFKDDGNYKTRAEVKFEGDTLVNRIELKGIDFKEDGNILGHKLEYNYNSHNVYIMADKQKNGIKVNFKIRHNIEDGSVQLADHYQQNTPIGDGPVLLPDNHYLSTQSALSKDPNEKRDHMVLLEFVTAAGITLGMDELYK

SEQ ID NO: 133 - protein, 1564 aa, synthetic construct
  REGION 1..1564: note = SYNTHETIC
  VARIANT 1308: note = X can be any naturally occurring amino acid
  VARIANT 1310: note = X can be any naturally occurring amino acid
  VARIANT 1312: note = X can be any naturally occurring amino acid
  VARIANT 1314: note = X can be any naturally occurring amino acid
  VARIANT 1316: note = X can be any naturally occurring amino acid
  VARIANT 1318: note = X can be any naturally occurring amino acid
  VARIANT 1320: note = X can be any naturally occurring amino acid
  VARIANT 1322: note = X can be any naturally occurring amino acid
  VARIANT 1324: note = X can be any naturally occurring amino acid
MTQFEGFTNLYQVSKTLRFELIPQGKTLKHIQEQGFIEEDKARNDHYKELKPIIDRIYKTYADQCLQLVQLDWENLSAAIDSYRKEKTEETRNALIEEQATYRNAIHDYFIGRTDNLTDAINKRHAEIYKGLFKAELFNGKVLKQLGTVTTTEHENALLRSFDKFTTYFSGFYENRKNVFSAEDISTAIPHRIVQDNFPKFKENCHIFTRLITAVPSLREHFENVKKAIGIFVSTSIEEVFSFPFYNQLLTQTQIDLYNQLLGGISREAGTEKIKGLNEVLNLAIQKNDETAHIIASLPHRFIPLFKQILSDRNTLSFILEEFKSDEEVIQSFCKYKTLLRNENVLETAEALFNELNSIDLTHIFISHKKLETISSALCDHWDTLRNALYERRISELTGKITKSAKEKVQRSLKHEDINLQEIISAAGKELSEAFKQKTSEILSHAHAALDQPLPTTLKKQEEKEILKSQLDSLLGLYHLLDWFAVDESNEVDPEFSARLTGIKLEMEPSLSFYNKARNYATKKPYSVEKFKLNFQMPTLASGWDVNKEKNNGAILFVKNGLYYLGIMPKQKGRYKALSFEPTEKTSEGFDKMYYDYFPDAAKMIPKCSTQLKAVTAHFQTHTTPILLSNNFIEPLEITKEIYDLNNPEKEPKKFQTAYAKKTGDQKGYREALCKWIDFTRDFLSKYTKTTSIDLSSLRPSSQYKDLGEYYAELNPLLYHISFQRIAEKEIMDAVETGKLYLFQIYNKDFAKGHHGKPNLHTLYWTGLFSPENLAKTSIKLNGQAELFYRPKSRMKRMAHRLGEKMLNKKLKDQKTPIPDTLYQELYDYVNHRLSHDLSDEARALLPNVITKEVSHEIIKDRRFTSDKFFFHVPITLNYQAANSPSKFNQRVNAYLKEHPETPIIGIDRGERNLIYITVIDSTGKILEQRSLNTIQQFDYQKKLDNREKERVAARQAWSVVGTIKDLKQGYLSQVIHEIVDLMIHYQAVVVLENLNFGFKSKRTGIAEKAVYQQFEKMLIDKLNCLVLKDYPAEKVGGVLNPYQLTDQFTSFAKMGTQSGFLFYVPAPYTSKIDPLTGFVDPFVWKTIKNHESRKHFLEGFDFLHYDVKTGDFILHFKMNRNLSFQRGLPGFMPAWDIVFEKNETQFDAKGTPFIAGKRIVPVIENHRFTGRYRDLYPANELIALLEEKGIVFRDGSNILPKLLENDDSHAIDTMVALIRSVLQMRNSNAATGEDYINSPVRDLNGVCFDSRFQNPEWPMDADANGAYHIALKGQLLLNHLKESKDLKLQNGISNQDWLAYIQELRNXPXPXPXPXPXPXPXPXPMVSKGEELFTGVVPILVELDGDVNGHKFSVSGEGEGDATYGKLTLKFICTTGKLPVPWPTLVTTLTYGVQCFSRYPDHMKQHDFFKSAMPEGYVQERTIFFKDDGNYKTRAEVKFEGDTLVNRIELKGIDFKEDGNILGHKLEYNYNSHNVYIMADKQKNGIKVNFKIRHNIEDGSVQLADHYQQNTPIGDGPVLLPDNHYLSTQSALSKDPNEKRDHMVLLEFVTAAGITLGMDELYK

SEQ ID NO: 134 - protein, 1566 aa, synthetic construct
  REGION 1..1566: note = SYNTHETIC
  VARIANT 1308: note = X can be any naturally occurring amino acid
  VARIANT 1310: note = X can be any naturally occurring amino acid
  VARIANT 1312: note = X can be any naturally occurring amino acid
  VARIANT 1314: note = X can be any naturally occurring amino acid
  VARIANT 1316: note = X can be any naturally occurring amino acid
  VARIANT 1318: note = X can be any naturally occurring amino acid
  VARIANT 1320: note = X can be any naturally occurring amino acid
  VARIANT 1322: note = X can be any naturally occurring amino acid
  VARIANT 1324: note = X can be any naturally occurring amino acid
  VARIANT 1326: note = X can be any naturally occurring amino acid
MTQFEGFTNLYQVSKTLRFELIPQGKTLKHIQEQGFIEEDKARNDHYKELKPIIDRIYKTYADQCLQLVQLDWENLSAAIDSYRKEKTEETRNALIEEQATYRNAIHDYFIGRTDNLTDAINKRHAEIYKGLFKAELFNGKVLKQLGTVTTTEHENALLRSFDKFTTYFSGFYENRKNVFSAEDISTAIPHRIVQDNFPKFKENCHIFTRLITAVPSLREHFENVKKAIGIFVSTSIEEVFSFPFYNQLLTQTQIDLYNQLLGGISREAGTEKIKGLNEVLNLAIQKNDETAHIIASLPHRFIPLFKQILSDRNTLSFILEEFKSDEEVIQSFCKYKTLLRNENVLETAEALFNELNSIDLTHIFISHKKLETISSALCDHWDTLRNALYERRISELTGKITKSAKEKVQRSLKHEDINLQEIISAAGKELSEAFKQKTSEILSHAHAALDQPLPTTLKKQEEKEILKSQLDSLLGLYHLLDWFAVDESNEVDPEFSARLTGIKLEMEPSLSFYNKARNYATKKPYSVEKFKLNFQMPTLASGWDVNKEKNNGAILFVKNGLYYLGIMPKQKGRYKALSFEPTEKTSEGFDKMYYDYFPDAAKMIPKCSTQLKAVTAHFQTHTTPILLSNNFIEPLEITKEIYDLNNPEKEPKKFQTAYAKKTGDQKGYREALCKWIDFTRDFLSKYTKTTSIDLSSLRPSSQYKDLGEYYAELNPLLYHISFQRIAEKEIMDAVETGKLYLFQIYNKDFAKGHHGKPNLHTLYWTGLFSPENLAKTSIKLNGQAELFYRPKSRMKRMAHRLGEKMLNKKLKDQKTPIPDTLYQELYDYVNHRLSHDLSDEARALLPNVITKEVSHEIIKDRRFTSDKFFFHVPITLNYQAANSPSKFNQRVNAYLKEHPETPIIGIDRGERNLIYITVIDSTGKILEQRSLNTIQQFDYQKKLDNREKERVAARQAWSVVGTIKDLKQGYLSQVIHEIVDLMIHYQAVVVLENLNFGFKSKRTGIAEKAVYQQFEKMLIDKLNCLVLKDYPAEKVGGVLNPYQLTDQFTSFAKMGTQSGFLFYVPAPYTSKIDPLTGFVDPFVWKTIKNHESRKHFLEGFDFLHYDVKTGDFILHFKMNRNLSFQRGLPGFMPAWDIVFEKNETQFDAKGTPFIAGKRIVPVIENHRFTGRYRDLYPANELIALLEEKGIVFRDGSNILPKLLENDDSHAIDTMVALIRSVLQMRNSNAATGEDYINSPVRDLNGVCFDSRFQNPEWPMDADANGAYHIALKGQLLLNHLKESKDLKLQNGISNQDWLAYIQELRNXPXPXPXPXPXPXPXPXPXPMVSKGEELFTGVVPILVELDGDVNGHKFSVSGEGEGDATYGKLTLKFICTTGKLPVPWPTLVTTLTYGVQCFSRYPDHMKQHDFFKSAMPEGYVQERTIFFKDDGNYKTRAEVKFEGDTLVNRIELKGIDFKEDGNILGHKLEYNYNSHNVYIMADKQKNGIKVNFKIRHNIEDGSVQLADHYQQNTPIGDGPVLLPDNHYLSTQSALSKDPNEKRDHMVLLEFVTAAGITLGMDELYK

SEQ ID NO: 135 - protein, 1568 aa, synthetic construct
  REGION 1..1568: note = SYNTHETIC
  VARIANT 1308: note = X can be any naturally occurring amino acid
  VARIANT 1310: note = X can be any naturally occurring amino acid
  VARIANT 1312: note = X can be any naturally occurring amino acid
  VARIANT 1314: note = X can be any naturally occurring amino acid
  VARIANT 1316: note = X can be any naturally occurring amino acid
  VARIANT 1318: note = X can be any naturally occurring amino acid
  VARIANT 1320: note = X can be any naturally occurring amino acid
  VARIANT 1322: note = X can be any naturally occurring amino acid
  VARIANT 1324: note = X can be any naturally occurring amino acid
  VARIANT 1326: note = X can be any naturally occurring amino acid
  VARIANT 1328: note = X can be any naturally occurring amino acid
MTQFEGFTNLYQVSKTLRFELIPQGKTLKHIQEQGFIEEDKARNDHYKELKPIIDRIYKTYADQCLQLVQLDWENLSAAIDSYRKEKTEETRNALIEEQATYRNAIHDYFIGRTDNLTDAINKRHAEIYKGLFKAELFNGKVLKQLGTVTTTEHENALLRSFDKFTTYFSGFYENRKNVFSAEDISTAIPHRIVQDNFPKFKENCHIFTRLITAVPSLREHFENVKKAIGIFVSTSIEEVFSFPFYNQLLTQTQIDLYNQLLGGISREAGTEKIKGLNEVLNLAIQKNDETAHIIASLPHRFIPLFKQILSDRNTLSFILEEFKSDEEVIQSFCKYKTLLRNENVLETAEALFNELNSIDLTHIFISHKKLETISSALCDHWDTLRNALYERRISELTGKITKSAKEKVQRSLKHEDINLQEIISAAGKELSEAFKQKTSEILSHAHAALDQPLPTTLKKQEEKEILKSQLDSLLGLYHLLDWFAVDESNEVDPEFSARLTGIKLEMEPSLSFYNKARNYATKKPYSVEKFKLNFQMPTLASGWDVNKEKNNGAILFVKNGLYYLGIMPKQKGRYKALSFEPTEKTSEGFDKMYYDYFPDAAKMIPKCSTQLKAVTAHFQTHTTPILLSNNFIEPLEITKEIYDLNNPEKEPKKFQTAYAKKTGDQKGYREALCKWIDFTRDFLSKYTKTTSIDLSSLRPSSQYKDLGEYYAELNPLLYHISFQRIAEKEIMDAVETGKLYLFQIYNKDFAKGHHGKPNLHTLYWTGLFSPENLAKTSIKLNGQAELFYRPKSRMKRMAHRLGEKMLNKKLKDQKTPIPDTLYQELYDYVNHRLSHDLSDEARALLPNVITKEVSHEIIKDRRFTSDKFFFHVPITLNYQAANSPSKFNQRVNAYLKEHPETPIIGIDRGERNLIYITVIDSTGKILEQRSLNTIQQFDYQKKLDNREKERVAARQAWSVVGTIKDLKQGYLSQVIHEIVDLMIHYQAVVVLENLNFGFKSKRTGIAEKAVYQQFEKMLIDKLNCLVLKDYPAEKVGGVLNPYQLTDQFTSFAKMGTQSGFLFYVPAPYTSKIDPLTGFVDPFVWKTIKNHESRKHFLEGFDFLHYDVKTGDFILHFKMNRNLSFQRGLPGFMPAWDIVFEKNETQFDAKGTPFIAGKRIVPVIENHRFTGRYRDLYPANELIALLEEKGIVFRDGSNILPKLLENDDSHAIDTMVALIRSVLQMRNSNAATGEDYINSPVRDLNGVCFDSRFQNPEWPMDADANGAYHIALKGQLLLNHLKESKDLKLQNGISNQDWLAYIQELRNXPXPXPXPXPXPXPXPXPXPXPMVSKGEELFTGVVPILVELDGDVNGHKFSVSGEGEGDATYGKLTLKFICTTGKLPVPWPTLVTTLTYGVQCFSRYPDHMKQHDFFKSAMPEGYVQERTIFFKDDGNYKTRAEVKFEGDTLVNRIELKGIDFKEDGNILGHKLEYNYNSHNVYIMADKQKNGIKVNFKIRHNIEDGSVQLADHYQQNTPIGDGPVLLPDNHYLSTQSALSKDPNEKRDHMVLLEFVTAAGITLGMDELYK

SEQ ID NO: 136 - protein, 1570 aa, synthetic construct
  REGION 1..1570: note = SYNTHETIC
  VARIANT 1308: note = X can be any naturally occurring amino acid
  VARIANT 1310: note = X can be any naturally occurring amino acid
  VARIANT 1312: note = X can be any naturally occurring amino acid
  VARIANT 1314: note = X can be any naturally occurring amino acid
  VARIANT 1316: note = X can be any naturally occurring amino acid
  VARIANT 1318: note = X can be any naturally occurring amino acid
  VARIANT 1320: note = X can be any naturally occurring amino acid
  VARIANT 1322: note = X can be any naturally occurring amino acid
  VARIANT 1324: note = X can be any naturally occurring amino acid
  VARIANT 1326: note = X can be any naturally occurring amino acid
  VARIANT 1328: note = X can be any naturally occurring amino acid
  VARIANT 1330: note = X can be any naturally occurring amino acid
MTQFEGFTNLYQVSKTLRFELIPQGKTLKHIQEQGFIEEDKARNDHYKELKPIIDRIYKTYADQCLQLVQLDWENLSAAIDSYRKEKTEETRNALIEEQATYRNAIHDYFIGRTDNLTDAINKRHAEIYKGLFKAELFNGKVLKQLGTVTTTEHENALLRSFDKFTTYFSGFYENRKNVFSAEDISTAIPHRIVQDNFPKFKENCHIFTRLITAVPSLREHFENVKKAIGIFVSTSIEEVFSFPFYNQLLTQTQIDLYNQLLGGISREAGTEKIKGLNEVLNLAIQKNDETAHIIASLPHRFIPLFKQILSDRNTLSFILEEFKSDEEVIQSFCKYKTLLRNENVLETAEALFNELNSIDLTHIFISHKKLETISSALCDHWDTLRNALYERRISELTGKITKSAKEKVQRSLKHEDINLQEIISAAGKELSEAFKQKTSEILSHAHAALDQPLPTTLKKQEEKEILKSQLDSLLGLYHLLDWFAVDESNEVDPEFSARLTGIKLEMEPSLSFYNKARNYATKKPYSVEKFKLNFQMPTLASGWDVNKEKNNGAILFVKNGLYYLGIMPKQKGRYKALSFEPTEKTSEGFDKMYYDYFPDAAKMIPKCSTQLKAVTAHFQTHTTPILLSNNFIEPLEITKEIYDLNNPEKEPKKFQTAYAKKTGDQKGYREALCKWIDFTRDFLSKYTKTTSIDLSSLRPSSQYKDLGEYYAELNPLLYHISFQRIAEKEIMDAVETGKLYLFQIYNKDFAKGHHGKPNLHTLYWTGLFSPENLAKTSIKLNGQAELFYRPKSRMKRMAHRLGEKMLNKKLKDQKTPIPDTLYQELYDYVNHRLSHDLSDEARALLPNVITKEVSHEIIKDRRFTSDKFFFHVPITLNYQAANSPSKFNQRVNAYLKEHPETPIIGIDRGERNLIYITVIDSTGKILEQRSLNTIQQFDYQKKLDNREKERVAARQAWSVVGTIKDLKQGYLSQVIHEIVDLMIHYQAVVVLENLNFGFKSKRTGIAEKAVYQQFEKMLIDKLNCLVLKDYPAEKVGGVLNPYQLTDQFTSFAKMGTQSGFLFYVPAPYTSKIDPLTGFVDPFVWKTIKNHESRKHFLEGFDFLHYDVKTGDFILHFKMNRNLSFQRGLPGFMPAWDIVFEKNETQFDAKGTPFIAGKRIVPVIENHRFTGRYRDLYPANELIALLEEKGIVFRDGSNILPKLLENDDSHAIDTMVALIRSVLQMRNSNAATGEDYINSPVRDLNGVCFDSRFQNPEWPMDADANGAYHIALKGQLLLNHLKESKDLKLQNGISNQDWLAYIQELRNXPXPXPXPXPXPXPXPXPXPXPXPMVSKGEELFTGVVPILVELDGDVNGHKFSVSGEGEGDATYGKLTLKFICTTGKLPVPWPTLVTTLTYGVQCFSRYPDHMKQHDFFKSAMPEGYVQERTIFFKDDGNYKTRAEVKFEGDTLVNRIELKGIDFKEDGNILGHKLEYNYNSHNVYIMADKQKNGIKVNFKIRHNIEDGSVQLADHYQQNTPIGDGPVLLPDNHYLSTQSALSKDPNEKRDHMVLLEFVTAAGITLGMDELYK

SEQ ID NO: 137 - protein, 1572 aa, synthetic construct
  REGION 1..1572: note = SYNTHETIC
  VARIANT 1308: note = X can be any naturally occurring amino acid
  VARIANT 1310: note = X can be any naturally occurring amino acid
  VARIANT 1312: note = X can be any naturally occurring amino acid
  VARIANT 1314: note = X can be any naturally occurring amino acid
  VARIANT 1316: note = X can be any naturally occurring amino acid
  VARIANT 1318: note = X can be any naturally occurring amino acid
  VARIANT 1320: note = X can be any naturally occurring amino acid
  VARIANT 1322: note = X can be any naturally occurring amino acid
  VARIANT 1324: note = X can be any naturally occurring amino acid
  VARIANT 1326: note = X can be any naturally occurring amino acid
  VARIANT 1328: note = X can be any naturally occurring amino acid
  VARIANT 1330: note = X can be any naturally occurring amino acid
  VARIANT 1332: note = X can be any naturally occurring amino acid
MTQFEGFTNLYQVSKTLRFELIPQGKTLKHIQEQGFIEEDKARNDHYKELKPIIDRIYKTYADQCLQLVQLDWENLSAAIDSYRKEKTEETRNALIEEQATYRNAIHDYFIGRTDNLTDAINKRHAEIYKGLFKAELFNGKVLKQLGTVTTTEHENALLRSFDKFTTYFSGFYENRKNVFSAEDISTAIPHRIVQDNFPKFKENCHIFTRLITAVPSLREHFENVKKAIGIFVSTSIEEVFSFPFYNQLLTQTQIDLYNQLLGGISREAGTEKIKGLNEVLNLAIQKNDETAHIIASLPHRFIPLFKQILSDRNTLSFILEEFKSDEEVIQSFCKYKTLLRNENVLETAEALFNELNSIDLTHIFISHKKLETISSALCDHWDTLRNALYERRISELTGKITKSAKEKVQRSLKHEDINLQEIISAAGKELSEAFKQKTSEILSHAHAALDQPLPTTLKKQEEKEILKSQLDSLLGLYHLLDWFAVDESNEVDPEFSARLTGIKLEMEPSLSFYNKARNYATKKPYSVEKFKLNFQMPTLASGWDVNKEKNNGAILFVKNGLYYLGIMPKQKGRYKALSFEPTEKTSEGFDKMYYDYFPDAAKMIPKCSTQLKAVTAHFQTHTTPILLSNNFIEPLEITKEIYDLNNPEKEPKKFQTAYAKKTGDQKGYREALCKWIDFTRDFLSKYTKTTSIDLSSLRPSSQYKDLGEYYAELNPLLYHISFQRIAEKEIMDAVETGKLYLFQIYNKDFAKGHHGKPNLHTLYWTGLFSPENLAKTSIKLNGQAELFYRPKSRMKRMAHRLGEKMLNKKLKDQKTPIPDTLYQELYDYVNHRLSHDLSDEARALLPNVITKEVSHEIIKDRRFTSDKFFFHVPITLNYQAANSPSKFNQRVNAYLKEHPETPIIGIDRGERNLIYITVIDSTGKILEQRSLNTIQQFDYQKKLDNREKERVAARQAWSVVGTIKDLKQGYLSQVIHEIVDLMIHYQAVVVLENLNFGFKSKRTGIAEKAVYQQFEKMLIDKLNCLVLKDYPAEKVGGVLNPYQLTDQFTSFAKMGTQSGFLFYVPAPYTSKIDPLTGFVDPFVWKTIKNHESRKHFLEGFDFLHYDVKTGDFILHFKMNRNLSFQRGLPGFMPAWDIVFEKNETQFDAKGTPFIAGKRIVPVIENHRFTGRYRDLYPANELIALLEEKGIVFRDGSNILPKLLENDDSHAIDTMVALIRSVLQMRNSNAATGEDYINSPVRDLNGVCFDSRFQNPEWPMDADANGAYHIALKGQLLLNHLKESKDLKLQNGISNQDWLAYIQELRNXPXPXPXPXPXPXPXPXPXPXPXPXPMVSKGEELFTGVVPILVELDGDVNGHKFSVSGEGEGDATYGKLTLKFICTTGKLPVPWPTLVTTLTYGVQCFSRYPDHMKQHDFFKSAMPEGYVQERTIFFKDDGNYKTRAEVKFEGDTLVNRIELKGIDFKEDGNILGHKLEYNYNSHNVYIMADKQKNGIKVNFKIRHNIEDGSVQLADHYQQNTPIGDGPVLLPDNHYLSTQSALSKDPNEKRDHMVLLEFVTAAGITLGMDELYK

SEQ ID NO: 138 - protein, 1574 aa, synthetic construct
  REGION 1..1574: note = SYNTHETIC
  VARIANT 1308: note = X can be any naturally occurring amino acid
  VARIANT 1310: note = X can be any naturally occurring amino acid
  VARIANT 1312: note = X can be any naturally occurring amino acid
  VARIANT 1314: note = X can be any naturally occurring amino acid
  VARIANT 1316: note = X can be any naturally occurring amino acid
  VARIANT 1318: note = X can be any naturally occurring amino acid
  VARIANT 1320: note = X can be any naturally occurring amino acid
  VARIANT 1322: note = X can be any naturally occurring amino acid
  VARIANT 1324: note = X can be any naturally occurring amino acid
  VARIANT 1326: note = X can be any naturally occurring amino acid
  VARIANT 1328: note = X can be any naturally occurring amino acid
  VARIANT 1330: note = X can be any naturally occurring amino acid
  VARIANT 1332: note = X can be any naturally occurring amino acid
  VARIANT 1334: note = X can be any naturally occurring amino acid
MTQFEGFTNLYQVSKTLRFELIPQGKTLKHIQEQGFIEEDKARNDHYKELKPIIDRIYKTYADQCLQLVQLDWENLSAAIDSYRKEKTEETRNALIEEQATYRNAIHDYFIGRTDNLTDAINKRHAEIYKGLFKAELFNGKVLKQLGTVTTTEHENALLRSFDKFTTYFSGFYENRKNVFSAEDISTAIPHRIVQDNFPKFKENCHIFTRLITAVPSLREHFENVKKAIGIFVSTSIEEVFSFPFYNQLLTQTQIDLYNQLLGGISREAGTEKIKGLNEVLNLAIQKNDETAHIIASLPHRFIPLFKQILSDRNTLSFILEEFKSDEEVIQSFCKYKTLLRNENVLETAEALFNELNSIDLTHIFISHKKLETISSALCDHWDTLRNALYERRISELTGKITKSAKEKVQRSLKHEDINLQEIISAAGKELSEAFKQKTSEILSHAHAALDQPLPTTLKKQEEKEILKSQLDSLLGLYHLLDWFAVDESNEVDPEFSARLTGIKLEMEPSLSFYNKARNYATKKPYSVEKFKLNFQMPTLASGWDVNKEKNNGAILFVKNGLYYLGIMPKQKGRYKALSFEPTEKTSEGFDKMYYDYFPDAAKMIPKCSTQLKAVTAHFQTHTTPILLSNNFIEPLEITKEIYDLNNPEKEPKKFQTAYAKKTGDQKGYREALCKWIDFTRDFLSKYTKTTSIDLSSLRPSSQYKDLGEYYAELNPLLYHISFQRIAEKEIMDAVETGKLYLFQIYNKDFAKGHHGKPNLHTLYWTGLFSPENLAKTSIKLNGQAELFYRPKSRMKRMAHRLGEKMLNKKLKDQKTPIPDTLYQELYDYVNHRLSHDLSDEARALLPNVITKEVSHEIIKDRRFTSDKFFFHVPITLNYQAANSPSKFNQRVNAYLKEHPETPIIGIDRGERNLIYITVIDSTGKILEQRSLNTIQQFDYQKKLDNREKERVAARQAWSVVGTIKDLKQGYLSQVIHEIVDLMIHYQAVVVLENLNFGFKSKRTGIAEKAVYQQFEKMLIDKLNCLVLKDYPAEKVGGVLNPYQLTDQFTSFAKMGTQSGFLFYVPAPYTSKIDPLTGFVDPFVWKTIKNHESRKHFLEGFDFLHYDVKTGDFILHFKMNRNLSFQRGLPGFMPAWDIVFEKNETQFDAKGTPFIAGKRIVPVIENHRFTGRYRDLYPANELIALLEEKGIVFRDGSNILPKLLENDDSHAIDTMVALIRSVLQMRNSNAATGEDYINSPVRDLNGVCFDSRFQNPEWPMDADANGAYHIALKGQLLLNHLKESKDLKLQNGISNQDWLAYIQELRNXPXPXPXPXPXPXPXPXPXPXPXPXPXPMVSKGEELFTGVVPILVELDGDVNGHKFSVSGEGEGDATYGKLTLKFICTTGKLPVPWPTLVTTLTYGVQCFSRYPDHMKQHDFFKSAMPEGYVQERTIFFKDDGNYKTRAEVKFEGDTLVNRIELKGIDFKEDGNILGHKLEYNYNSHNVYIMADKQKNGIKVNFKIRHNIEDGSVQLADHYQQNTPIGDGPVLLPDNHYLSTQSALSKDPNEKRDHMVLLEFVTAAGITLGMDELYK

SEQ ID NO: 139 - protein, 1561 aa, synthetic construct
  REGION 1..1561: note = SYNTHETIC
MTQFEGFTNLYQVSKTLRFELIPQGKTLKHIQEQGFIEEDKARNDHYKELKPIIDRIYKTYADQCLQLVQLDWENLSAAIDSYRKEKTEETRNALIEEQATYRNAIHDYFIGRTDNLTDAINKRHAEIYKGLFKAELFNGKVLKQLGTVTTTEHENALLRSFDKFTTYFSGFYENRKNVFSAEDISTAIPHRIVQDNFPKFKENCHIFTRLITAVPSLREHFENVKKAIGIFVSTSIEEVFSFPFYNQLLTQTQIDLYNQLLGGISREAGTEKIKGLNEVLNLAIQKNDETAHIIASLPHRFIPLFKQILSDRNTLSFILEEFKSDEEVIQSFCKYKTLLRNENVLETAEALFNELNSIDLTHIFISHKKLETISSALCDHWDTLRNALYERRISELTGKITKSAKEKVQRSLKHEDINLQEIISAAGKELSEAFKQKTSEILSHAHAALDQPLPTTLKKQEEKEILKSQLDSLLGLYHLLDWFAVDESNEVDPEFSARLTGIKLEMEPSLSFYNKARNYATKKPYSVEKFKLNFQMPTLASGWDVNKEKNNGAILFVKNGLYYLGIMPKQKGRYKALSFEPTEKTSEGFDKMYYDYFPDAAKMIPKCSTQLKAVTAHFQTHTTPILLSNNFIEPLEITKEIYDLNNPEKEPKKFQTAYAKKTGDQKGYREALCKWIDFTRDFLSKYTKTTSIDLSSLRPSSQYKDLGEYYAELNPLLYHISFQRIAEKEIMDAVETGKLYLFQIYNKDFAKGHHGKPNLHTLYWTGLFSPENLAKTSIKLNGQAELFYRPKSRMKRMAHRLGEKMLNKKLKDQKTPIPDTLYQELYDYVNHRLSHDLSDEARALLPNVITKEVSHEIIKDRRFTSDKFFFHVPITLNYQAANSPSKFNQRVNAYLKEHPETPIIGIDRGERNLIYITVIDSTGKILEQRSLNTIQQFDYQKKLDNREKERVAARQAWSVVGTIKDLKQGYLSQVIHEIVDLMIHYQAVVVLENLNFGFKSKRTGIAEKAVYQQFEKMLIDKLNCLVLKDYPAEKVGGVLNPYQLTDQFTSFAKMGTQSGFLFYVPAPYTSKIDPLTGFVDPFVWKTIKNHESRKHFLEGFDFLHYDVKTGDFILHFKMNRNLSFQRGLPGFMPAWDIVFEKNETQFDAKGTPFIAGKRIVPVIENHRFTGRYRDLYPANELIALLEEKGIVFRDGSNILPKLLENDDSHAIDTMVALIRSVLQMRNSNAATGEDYINSPVRDLNGVCFDSRFQNPEWPMDADANGAYHIALKGQLLLNHLKESKDLKLQNGISNQDWLAYIQELRNGGGGSEAAAKGGGGSMVSKGEELFTGVVPILVELDGDVNGHKFSVSGEGEGDATYGKLTLKFICTTGKLPVPWPTLVTTLTYGVQCFSRYPDHMKQHDFFKSAMPEGYVQERTIFFKDDGNYKTRAEVKFEGDTLVNRIELKGIDFKEDGNILGHKLEYNYNSHNVYIMADKQKNGIKVNFKIRHNIEDGSVQLADHYQQNTPIGDGPVLLPDNHYLSTQSALSKDPNEKRDHMVLLEFVTAAGITLGMDELYK

SEQ ID NO: 140 - protein, 1555 aa, synthetic construct
  REGION 1..1555: note = SYNTHETIC
MTQFEGFTNLYQVSKTLRFELIPQGKTLKHIQEQGFIEEDKARNDHYKELKPIIDRIYKTYADQCLQLVQLDWENLSAAIDSYRKEKTEETRNALIEEQATYRNAIHDYFIGRTDNLTDAINKRHAEIYKGLFKAELFNGKVLKQLGTVTTTEHENALLRSFDKFTTYFSGFYENRKNVFSAEDISTAIPHRIVQDNFPKFKENCHIFTRLITAVPSLREHFENVKKAIGIFVSTSIEEVFSFPFYNQLLTQTQIDLYNQLLGGISREAGTEKIKGLNEVLNLAIQKNDETAHIIASLPHRFIPLFKQILSDRNTLSFILEEFKSDEEVIQSFCKYKTLLRNENVLETAEALFNELNSIDLTHIFISHKKLETISSALCDHWDTLRNALYERRISELTGKITKSAKEKVQRSLKHEDINLQEIISAAGKELSEAFKQKTSEILSHAHAALDQPLPTTLKKQEEKEILKSQLDSLLGLYHLLDWFAVDESNEVDPEFSARLTGIKLEMEPSLSFYNKARNYATKKPYSVEKFKLNFQMPTLASGWDVNKEKNNGAILFVKNGLYYLGIMPKQKGRYKALSFEPTEKTSEGFDKMYYDYFPDAAKMIPKCSTQLKAVTAHFQTHTTPILLSNNFIEPLEITKEIYDLNNPEKEPKKFQTAYAKKTGDQKGYREALCKWIDFTRDFLSKYTKTTSIDLSSLRPSSQYKDLGEYYAELNPLLYHISFQRIAEKEIMDAVETGKLYLFQIYNKDFAKGHHGKPNLHTLYWTGLFSPENLAKTSIKLNGQAELFYRPKSRMKRMAHRLGEKMLNKKLKDQKTPIPDTLYQELYDYVNHRLSHDLSDEARALLPNVITKEVSHEIIKDRRFTSDKFFFHVPITLNYQAANSPSKFNQRVNAYLKEHPETPIIGIDRGERNLIYITVIDSTGKILEQRSLNTIQQFDYQKKLDNREKERVAARQAWSVVGTIKDLKQGYLSQVIHEIVDLMIHYQAVVVLENLNFGFKSKRTGIAEKAVYQQFEKMLIDKLNCLVLKDYPAEKVGGVLNPYQLTDQFTSFAKMGTQSGFLFYVPAPYTSKIDPLTGFVDPFVWKTIKNHESRKHFLEGFDFLHYDVKTGDFILHFKMNRNLSFQRGLPGFMPAWDIVFEKNETQFDAKGTPFIAGKRIVPVIENHRFTGRYRDLYPANELIALLEEKGIVFRDGSNILPKLLENDDSHAIDTMVALIRSVLQMRNSNAATGEDYINSPVRDLNGVCFDSRFQNPEWPMDADANGAYHIALKGQLLLNHLKESKDLKLQNGISNQDWLAYIQELRNGSAGSAAGSGEFMVSKGEEDNMAIIKEFMRFKVHMEGSVNGHEFEIEGEGEGRPYEGTQTAKLKVTKGGPLPFAWDILSPQFMYGSKAYVKHPADIPDYLKLSFPEGFKWERVMNFEDGGVVTVTQDSSLQDGEFIYKVKLRGTNFPSDGPVMQKKTMGWEASSERMYPEDGALKGEIKQRLKLKDGGHYDAEVKTTYKAKKPVQLPGAYNVNIKLDITSHNEDYTIVEQYERAEGRHSTGGMDELYK

SEQ ID NO: 141 - protein, 1563 aa, synthetic construct
  REGION 1..1563: note = SYNTHETIC
MTQFEGFTNLYQVSKTLRFELIPQGKTLKHIQEQGFIEEDKARNDHYKELKPIIDRIYKTYADQCLQLVQLDWENLSAAIDSYRKEKTEETRNALIEEQATYRNAIHDYFIGRTDNLTDAINKRHAEIYKGLFKAELFNGKVLKQLGTVTTTEHENALLRSFDKFTTYFSGFYENRKNVFSAEDISTAIPHRIVQDNFPKFKENCHIFTRLITAVPSLREHFENVKKAIGIFVSTSIEEVFSFPFYNQLLTQTQIDLYNQLLGGISREAGTEKIKGLNEVLNLAIQKNDETAHIIASLPHRFIPLFKQILSDRNTLSFILEEFKSDEEVIQSFCKYKTLLRNENVLETAEALFNELNSIDLTHIFISHKKLETISSALCDHWDTLRNALYERRISELTGKITKSAKEKVQRSLKHEDINLQEIISAAGKELSEAFKQKTSEILSHAHAALDQPLPTTLKKQEEKEILKSQLDSLLGLYHLLDWFAVDESNEVDPEFSARLTGIKLEMEPSLSFYNKARNYATKKPYSVEKFKLNFQMPTLASGWDVNKEKNNGAILFVKNGLYYLGIMPKQKGRYKALSFEPTEKTSEGFDKMYYDYFPDAAKMIPKCSTQLKAVTAHFQTHTTPILLSNNFIEPLEITKEIYDLNNPEKEPKKFQTAYAKKTGDQKGYREALCKWIDFTRDFLSKYTKTTSIDLSSLRPSSQYKDLGEYYAELNPLLYHISFQRIAEKEIMDAVETGKLYLFQIYNKDFAKGHHGKPNLHTLYWTGLFSPENLAKTSIKLNGQAELFYRPKSRMKRMAHRLGEKMLNKKLKDQKTPIPDTLYQELYDYVNHRLSHDLSDEARALLPNVITKEVSHEIIKDRRFTSDKFFFHVPITLNYQAANSPSKFNQRVNAYLKEHPETPIIGIDRGERNLIYITVIDSTGKILEQRSLNTIQQFDYQKKLDNREKERVAARQAWSVVGTIKDLKQGYLSQVIHEIVDLMIHYQAVVVLENLNFGFKSKRTGIAEKAVYQQFEKMLIDKLNCLVLKDYPAEKVGGVLNPYQLTDQFTSFAKMGTQSGFLFYVPAPYTSKIDPLTGFVDPFVWKTIKNHESRKHFLEGFDFLHYDVKTGDFILHFKMNRNLSFQRGLPGFMPAWDIVFEKNETQFDAKGTPFIAGKRIVPVIENHRFTGRYRDLYPANELIALLEEKGIVFRDGSNILPKLLENDDSHAIDTMVALIRSVLQMRNSNAATGEDYINSPVRDLNGVCFDSRFQNPEWPMDADANGAYHIALKGQLLLNHLKESKDLKLQNGISNQDWLAYIQELRNGGGGSGGGGSGGGGSGGGGSMVSKGEEDNMAIIKEFMRFKVHMEGSVNGHEFEIEGEGEGRPYEGTQTAKLKVTKGGPLPFAWDILSPQFMYGSKAYVKHPADIPDYLKLSFPEGFKWERVMNFEDGGVVTVTQDSSLQDGEFIYKVKLRGTNFPSDGPVMQKKTMGWEASSERMYPEDGALKGEIKQRLKLKDGGHYDAEVKTTYKAKKPVQLPGAYNVNIKLDITSHNEDYTIVEQYERAEGRHSTGGMDELYK

SEQ ID NO: 142 - protein, 1565 aa, synthetic construct
  REGION 1..1565: note = SYNTHETIC
MTQFEGFTNLYQVSKTLRFELIPQGKTLKHIQEQGFIEEDKARNDHYKELKPIIDRIYKTYADQCLQLVQLDWENLSAAIDSYRKEKTEETRNALIEEQATYRNAIHDYFIGRTDNLTDAINKRHAEIYKGLFKAELFNGKVLKQLGTVTTTEHENALLRSFDKFTTYFSGFYENRKNVFSAEDISTAIPHRIVQDNFPKFKENCHIFTRLITAVPSLREHFENVKKAIGIFVSTSIEEVFSFPFYNQLLTQTQIDLYNQLLGGISREAGTEKIKGLNEVLNLAIQKNDETAHIIASLPHRFIPLFKQILSDRNTLSFILEEFKSDEEVIQSFCKYKTLLRNENVLETAEALFNELNSIDLTHIFISHKKLETISSALCDHWDTLRNALYERRISELTGKITKSAKEKVQRSLKHEDINLQEIISAAGKELSEAFKQKTSEILSHAHAALDQPLPTTLKKQEEKEILKSQLDSLLGLYHLLDWFAVDESNEVDPEFSARLTGIKLEMEPSLSFYNKARNYATKKPYSVEKFKLNFQMPTLASGWDVNKEKNNGAILFVKNGLYYLGIMPKQKGRYKALSFEPTEKTSEGFDKMYYDYFPDAAKMIPKCSTQLKAVTAHFQTHTTPILLSNNFIEPLEITKEIYDLNNPEKEPKKFQTAYAKKTGDQKGYREALCKWIDFTRDFLSKYTKTTSIDLSSLRPSSQYKDLGEYYAELNPLLYHISFQRIAEKEIMDAVETGKLYLFQIYNKDFAKGHHGKPNLHTLYWTGLFSPENLAKTSIKLNGQAELFYRPKSRMKRMAHRLGEKMLNKKLKDQKTPIPDTLYQELYDYVNHRLSHDLSDEARALLPNVITKEVSHEIIKDRRFTSDKFFFHVPITLNYQAANSPSKFNQRVNAYLKEHPETPIIGIDRGERNLIYITVIDSTGKILEQRSLNTIQQFDYQKKLDNREKERVAARQAWSVVGTIKDLKQGYLSQVIHEIVDLMIHYQAVVVLENLNFGFKSKRTGIAEKAVYQQFEKMLIDKLNCLVLKDYPAEKVGGVLNPYQLTDQFTSFAKMGTQSGFLFYVPAPYTSKIDPLTGFVDPFVWKTIKNHESRKHFLEGFDFLHYDVKTGDFILHFKMNRNLSFQRGLPGFMPAWDIVFEKNETQFDAKGTPFIAGKRIVPVIENHRFTGRYRDLYPANELIALLEEKGIVFRDGSNILPKLLENDDSHAIDTMVALIRSVLQMRNSNAATGEDYINSPVRDLNGVCFDSRFQNPEWPMDADANGAYHIALKGQLLLNHLKESKDLKLQNGISNQDWLAYIQELRNAEAAAKEAAAKEAAAKEAAAKAMVSKGEEDNMAIIKEFMRFKVHMEGSVNGHEFEIEGEGEGRPYEGTQTAKLKVTKGGPLPFAWDILSPQFMYGSKAYVKHPADIPDYLKLSFPEGFKWERVMNFEDGGVVTVTQDSSLQDGEFIYKVKLRGTNFPSDGPVMQKKTMGWEASSERMYPEDGALKGEIKQRLKLKDGGHYDAEVKTTYKAKKPVQLPGAYNVNIKLDITSHNEDYTIVEQYERAEGRHSTGGMDELYK

SEQ ID NO: 143 - protein, 1589 aa, synthetic construct
  REGION 1..1589: note = SYNTHETIC
MTQFEGFTNLYQVSKTLRFELIPQGKTLKHIQEQGFIEEDKARNDHYKELKPIIDRIYKTYADQCLQLVQLDWENLSAAIDSYRKEKTEETRNALIEEQATYRNAIHDYFIGRTDNLTDAINKRHAEIYKGLFKAELFNGKVLKQLGTVTTTEHENALLRSFDKFTTYFSGFYENRKNVFSAEDISTAIPHRIVQDNFPKFKENCHIFTRLITAVPSLREHFENVKKAIGIFVSTSIEEVFSFPFYNQLLTQTQIDLYNQLLGGISREAGTEKIKGLNEVLNLAIQKNDETAHIIASLPHRFIPLFKQILSDRNTLSFILEEFKSDEEVIQSFCKYKTLLRNENVLETAEALFNELNSIDLTHIFISHKKLETISSALCDHWDTLRNALYERRISELTGKITKSAKEKVQRSLKHEDINLQEIISAAGKELSEAFKQKTSEILSHAHAALDQPLPTTLKKQEEKEILKSQLDSLLGLYHLLDWFAVDESNEVDPEFSARLTGIKLEMEPSLSFYNKARNYATKKPYSVEKFKLNFQMPTLASGWDVNKEKNNGAILFVKNGLYYLGIMPKQKGRYKALSFEPTEKTSEGFDKMYYDYFPDAAKMIPKCSTQLKAVTAHFQTHTTPILLSNNFIEPLEITKEIYDLNNPEKEPKKFQTAYAKKTGDQKGYREALCKWIDFTRDFLSKYTKTTSIDLSSLRPSSQYKDLGEYYAELNPLLYHISFQRIAEKEIMDAVETGKLYLFQIYNKDFAKGHHGKPNLHTLYWTGLFSPENLAKTSIKLNGQAELFYRPKSRMKRMAHRLGEKMLNKKLKDQKTPIPDTLYQELYDYVNHRLSHDLSDEARALLPNVITKEVSHEIIKDRRFTSDKFFFHVPITLNYQAANSPSKFNQRVNAYLKEHPETPIIGIDRGERNLIYITVIDSTGKILEQRSLNTIQQFDYQKKLDNREKERVAARQAWSVVGTIKDLKQGYLSQVIHEIVDLMIHYQAVVVLENLNFGFKSKRTGIAEKAVYQQFEKMLIDKLNCLVLKDYPAEKVGGVLNPYQLTDQFTSFAKMGTQSGFLFYVPAPYTSKIDPLTGFVDPFVWKTIKNHESRKHFLEGFDFLHYDVKTGDFILHFKMNRNLSFQRGLPGFMPAWDIVFEKNETQFDAKGTPFIAGKRIVPVIENHRFTGRYRDLYPANELIALLEEKGIVFRDGSNILPKLLENDDSHAIDTMVALIRSVLQMRNSNAATGEDYINSPVRDLNGVCFDSRFQNPEWPMDADANGAYHIALKGQLLLNHLKESKDLKLQNGISNQDWLAYIQELRNAEAAAKEAAAKEAAAKEAAAKALEAEAAAKEAAAKEAAAKEAAAKAMVSKGEEDNMAIIKEFMRFKVHMEGSVNGHEFEIEGEGEGRPYEGTQTAKLKVTKGGPLPFAWDILSPQFMYGSKAYVKHPADIPDYLKLSFPEGFKWERVMNFEDGGVVTVTQDSSLQDGEFIYKVKLRGTNFPSDGPVMQKKTMGWEASSERMYPEDGALKGEIKQRLKLKDGGHYDAEVKTTYKAKKPVQLPGAYNVNIKLDITSHNEDYTIVEQYERAEGRHSTGGMDELYK

SEQ ID NO: 144 - protein, 1593 aa, synthetic construct
  REGION 1..1593: note = SYNTHETIC
MTQFEGFTNLYQVSKTLRFELIPQGKTLKHIQEQGFIEEDKARNDHYKELKPIIDRIYKTYADQCLQLVQLDWENLSAAIDSYRKEKTEETRNALIEEQATYRNAIHDYFIGRTDNLTDAINKRHAEIYKGLFKAELFNGKVLKQLGTVTTTEHENALLRSFDKFTTYFSGFYENRKNVFSAEDISTAIPHRIVQDNFPKFKENCHIFTRLITAVPSLREHFENVKKAIGIFVSTSIEEVFSFPFYNQLLTQTQIDLYNQLLGGISREAGTEKIKGLNEVLNLAIQKNDETAHIIASLPHRFIPLFKQILSDRNTLSFILEEFKSDEEVIQSFCKYKTLLRNENVLETAEALFNELNSIDLTHIFISHKKLETISSALCDHWDTLRNALYERRISELTGKITKSAKEKVQRSLKHEDINLQEIISAAGKELSEAFKQKTSEILSHAHAALDQPLPTTLKKQEEKEILKSQLDSLLGLYHLLDWFAVDESNEVDPEFSARLTGIKLEMEPSLSFYNKARNYATKKPYSVEKFKLNFQMPTLASGWDVNKEKNNGAILFVKNGLYYLGIMPKQKGRYKALSFEPTEKTSEGFDKMYYDYFPDAAKMIPKCSTQLKAVTAHFQTHTTPILLSNNFIEPLEITKEIYDLNNPEKEPKKFQTAYAKKTGDQKGYREALCKWIDFTRDFLSKYTKTTSIDLSSLRPSSQYKDLGEYYAELNPLLYHISFQRIAEKEIMDAVETGKLYLFQIYNKDFAKGHHGKPNLHTLYWTGLFSPENLAKTSIKLNGQAELFYRPKSRMKRMAHRLGEKMLNKKLKDQKTPIPDTLYQELYDYVNHRLSHDLSDEARALLPNVITKEVSHEIIKDRRFTSDKFFFHVPITLNYQAANSPSKFNQRVNAYLKEHPETPIIGIDRGERNLIYITVIDSTGKILEQRSLNTIQQFDYQKKLDNREKERVAARQAWSVVGTIKDLKQGYLSQVIHEIVDLMIHYQAVVVLENLNFGFKSKRTGIAEKAVYQQFEKMLIDKLNCLVLKDYPAEKVGGVLNPYQLTDQFTSFAKMGTQSGFLFYVPAPYTSKIDPLTGFVDPFVWKTIKNHESRKHFLEGFDFLHYDVKTGDFILHFKMNRNLSFQRGLPGFMPAWDIVFEKNETQFDAKGTPFIAGKRIVPVIENHRFTGRYRDLYPANELIALLEEKGIVFRDGSNILPKLLENDDSHAIDTMVALIRSVLQMRNSNAATGEDYINSPVRDLNGVCFDSRFQNPEWPMDADANGAYHIALKGQLLLNHLKESKDLKLQNGISNQDWLAYIQELRNLEAEAAAKEAAAKEAAAKEAAAKALEAEAAAKEAAAKEAAAKEAAAKALEMVSKGEEDNMAIIKEFMRFKVHMEGSVNGHEFEIEGEGEGRPYEGTQTAKLKVTKGGPLPFAWDILSPQFMYGSKAYVKHPADIPDYLKLSFPEGFKWERVMNFEDGGVVTVTQDSSLQDGEFIYKVKLRGTNFPSDGPVMQKKTMGWEASSERMYPEDGALKGEIKQRLKLKDGGHYDAEVKTTYKAKKPVQLPGAYNVNIKLDITSHNEDYTIVEQYERAEGRHSTGGMDELYK

SEQ ID NO: 145 - protein, 1546 aa, synthetic construct
  REGION 1..1546: note = SYNTHETIC
MTQFEGFTNLYQVSKTLRFELIPQGKTLKHIQEQGFIEEDKARNDHYKELKPIIDRIYKTYADQCLQLVQLDWENLSAAIDSYRKEKTEETRNALIEEQATYRNAIHDYFIGRTDNLTDAINKRHAEIYKGLFKAELFNGKVLKQLGTVTTTEHENALLRSFDKFTTYFSGFYENRKNVFSAEDISTAIPHRIVQDNFPKFKENCHIFTRLITAVPSLREHFENVKKAIGIFVSTSIEEVFSFPFYNQLLTQTQIDLYNQLLGGISREAGTEKIKGLNEVLNLAIQKNDETAHIIASLPHRFIPLFKQILSDRNTLSFILEEFKSDEEVIQSFCKYKTLLRNENVLETAEALFNELNSIDLTHIFISHKKLETISSALCDHWDTLRNALYERRISELTGKITKSAKEKVQRSLKHEDINLQEIISAAGKELSEAFKQKTSEILSHAHAALDQPLPTTLKKQEEKEILKSQLDSLLGLYHLLDWFAVDESNEVDPEFSARLTGIKLEMEPSLSFYNKARNYATKKPYSVEKFKLNFQMPTLASGWDVNKEKNNGAILFVKNGLYYLGIMPKQKGRYKALSFEPTEKTSEGFDKMYYDYFPDAAKMIPKCSTQLKAVTAHFQTHTTPILLSNNFIEPLEITKEIYDLNNPEKEPKKFQTAYAKKTGDQKGYREALCKWIDFTRDFLSKYTKTTSIDLSSLRPSSQYKDLGEYYAELNPLLYHISFQRIAEKEIMDAVETGKLYLFQIYNKDFAKGHHGKPNLHTLYWTGLFSPENLAKTSIKLNGQAELFYRPKSRMKRMAHRLGEKMLNKKLKDQKTPIPDTLYQELYDYVNHRLSHDLSDEARALLPNVITKEVSHEIIKDRRFTSDKFFFHVPITLNYQAANSPSKFNQRVNAYLKEHPETPIIGIDRGERNLIYITVIDSTGKILEQRSLNTIQQFDYQKKLDNREKERVAARQAWSVVGTIKDLKQGYLSQVIHEIVDLMIHYQAVVVLENLNFGFKSKRTGIAEKAVYQQFEKMLIDKLNCLVLKDYPAEKVGGVLNPYQLTDQFTSFAKMGTQSGFLFYVPAPYTSKIDPLTGFVDPFVWKTIKNHESRKHFLEGFDFLHYDVKTGDFILHFKMNRNLSFQRGLPGFMPAWDIVFEKNETQFDAKGTPFIAGKRIVPVIENHRFTGRYRDLYPANELIALLEEKGIVFRDGSNILPKLLENDDSHAIDTMVALIRSVLQMRNSNAATGEDYINSPVRDLNGVCFDSRFQNPEWPMDADANGAYHIALKGQLLLNHLKESKDLKLQNGISNQDWLAYIQELRNAPAMVSKGEEDNMAIIKEFMRFKVHMEGSVNGHEFEIEGEGEGRPYEGTQTAKLKVTKGGPLPFAWDILSPQFMYGSKAYVKHPADIPDYLKLSFPEGFKWERVMNFEDGGVVTVTQDSSLQDGEFIYKVKLRGTNFPSDGPVMQKKTMGWEASSERMYPEDGALKGEIKQRLKLKDGGHYDAEVKTTYKAKKPVQLPGAYNVNIKLDITSHNEDYTIVEQYERAEGRHSTGGMDELYK

SEQ ID NO: 146 - protein, 1548 aa, synthetic construct
  REGION 1..1548: note = SYNTHETIC
MTQFEGFTNLYQVSKTLRFELIPQGKTLKHIQEQGFIEEDKARNDHYKELKPIIDRIYKTYADQCLQLVQLDWENLSAAIDSYRKEKTEETRNALIEEQATYRNAIHDYFIGRTDNLTDAINKRHAEIYKGLFKAELFNGKVLKQLGTVTTTEHENALLRSFDKFTTYFSGFYENRKNVFSAEDISTAIPHRIVQDNFPKFKENCHIFTRLITAVPSLREHFENVKKAIGIFVSTSIEEVFSFPFYNQLLTQTQIDLYNQLLGGISREAGTEKIKGLNEVLNLAIQKNDETAHIIASLPHRFIPLFKQILSDRNTLSFILEEFKSDEEVIQSFCKYKTLLRNENVLETAEALFNELNSIDLTHIFISHKKLETISSALCDHWDTLRNALYERRISELTGKITKSAKEKVQRSLKHEDINLQEIISAAGKELSEAFKQKTSEILSHAHAALDQPLPTTLKKQEEKEILKSQLDSLLGLYHLLDWFAVDESNEVDPEFSARLTGIKLEMEPSLSFYNKARNYATKKPYSVEKFKLNFQMPTLASGWDVNKEKNNGAILFVKNGLYYLGIMPKQKGRYKALSFEPTEKTSEGFDKMYYDYFPDAAKMIPKCSTQLKAVTAHFQTHTTPILLSNNFIEPLEITKEIYDLNNPEKEPKKFQTAYAKKTGDQKGYREALCKWIDFTRDFLSKYTKTTSIDLSSLRPSSQYKDLGEYYAELNPLLYHISFQRIAEKEIMDAVETGKLYLFQIYNKDFAKGHHGKPNLHTLYWTGLFSPENLAKTSIKLNGQAELFYRPKSRMKRMAHRLGEKMLNKKLKDQKTPIPDTLYQELYDYVNHRLSHDLSDEARALLPNVITKEVSHEIIKDRRFTSDKFFFHVPITLNYQAANSPSKFNQRVNAYLKEHPETPIIGIDRGERNLIYITVIDSTGKILEQRSLNTIQQFDYQKKLDNREKERVAARQAWSVVGTIKDLKQGYLSQVIHEIVDLMIHYQAVVVLENLNFGFKSKRTGIAEKAVYQQFEKMLIDKLNCLVLKDYPAEKVGGVLNPYQLTDQFTSFAKMGTQSGFLFYVPAPYTSKIDPLTGFVDPFVWKTIKNHESRKHFLEGFDFLHYDVKTGDFILHFKMNRNLSFQRGLPGFMPAWDIVFEKNETQFDAKGTPFIAGKRIVPVIENHRFTGRYRDLYPANELIALLEEKGIVFRDGSNILPKLLENDDSHAIDTMVALIRSVLQMRNSNAATGEDYINSPVRDLNGVCFDSRFQNPEWPMDADANGAYHIALKGQLLLNHLKESKDLKLQNGISNQDWLAYIQELRNAPAPAMVSKGEEDNMAIIKEFMRFKVHMEGSVNGHEFEIEGEGEGRPYEGTQTAKLKVTKGGPLPFAWDILSPQFMYGSKAYVKHPADIPDYLKLSFPEGFKWERVMNFEDGGVVTVTQDSSLQDGEFIYKVKLRGTNFPSDGPVMQKKTMGWEASSERMYPEDGALKGEIKQRLKLKDGGHYDAEVKTTYKAKKPVQLPGAYNVNIKLDITSHNEDYTIVEQYERAEGRHSTGGMDELYK

SEQ ID NO: 147 - protein, 1550 aa, synthetic construct
  REGION 1..1550: note = SYNTHETIC
MTQFEGFTNLYQVSKTLRFELIPQGKTLKHIQEQGFIEEDKARNDHYKELKPIIDRIYKTYADQCLQLVQLDWENLSAAIDSYRKEKTEETRNALIEEQATYRNAIHDYFIGRTDNLTDAINKRHAEIYKGLFKAELFNGKVLKQLGTVTTTEHENALLRSFDKFTTYFSGFYENRKNVFSAEDISTAIPHRIVQDNFPKFKENCHIFTRLITAVPSLREHFENVKKAIGIFVSTSIEEVFSFPFYNQLLTQTQIDLYNQLLGGISREAGTEKIKGLNEVLNLAIQKNDETAHIIASLPHRFIPLFKQILSDRNTLSFILEEFKSDEEVIQSFCKYKTLLRNENVLETAEALFNELNSIDLTHIFISHKKLETISSALCDHWDTLRNALYERRISELTGKITKSAKEKVQRSLKHEDINLQEIISAAGKELSEAFKQKTSEILSHAHAALDQPLPTTLKKQEEKEILKSQLDSLLGLYHLLDWFAVDESNEVDPEFSARLTGIKLEMEPSLSFYNKARNYATKKPYSVEKFKLNFQMPTLASGWDVNKEKNNGAILFVKNGLYYLGIMPKQKGRYKALSFEPTEKTSEGFDKMYYDYFPDAAKMIPKCSTQLKAVTAHFQTHTTPILLSNNFIEPLEITKEIYDLNNPEKEPKKFQTAYAKKTGDQKGYREALCKWIDFTRDFLSKYTKTTSIDLSSLRPSSQYKDLGEYYAELNPLLYHISFQRIAEKEIMDAVETGKLYLFQIYNKDFAKGHHGKPNLHTLYWTGLFSPENLAKTSIKLNGQAELFYRPKSRMKRMAHRLGEKMLNKKLKDQKTPIPDTLYQELYDYVNHRLSHDLSDEARALLPNVITKEVSHEIIKDRRFTSDKFFFHVPITLNYQAANSPSKFNQRVNAYLKEHPETPIIGIDRGERNLIYITVIDSTGKILEQRSLNTIQQFDYQKKLDNREKERVAARQAWSVVGTIKDLKQGYLSQVIHEIVDLMIHYQAVVVLENLNFGFKSKRTGIAEKAVYQQFEKMLIDKLNCLVLKDYPAEKVGGVLNPYQLTDQFTSFAKMGTQSGFLFYVPAPYTSKIDPLTGFVDPFVWKTIKNHESRKHFLEGFDFLHYDVKTGDFILHFKMNRNLSFQRGLPGFMPAWDIVFEKNETQFDAKGTPFIAGKRIVPVIENHRFTGRYRDLYPANELIALLEEKGIVFRDGSNILPKLLENDDSHAIDTMVALIRSVLQMRNSNAATGEDYINSPVRDLNGVCFDSRFQNPEWPMDADANGAYHIALKGQLLLNHLKESKDLKLQNGISNQDWLAYIQELRNAPAPAPAMVSKGEEDNMAIIKEFMRFKVHMEGSVNGHEFEIEGEGEGRPYEGTQTAKLKVTKGGPLPFAWDILSPQFMYGSKAYVKHPADIPDYLKLSFPEGFKWERVMNFEDGGVVTVTQDSSLQDGEFIYKVKLRGTNFPSDGPVMQKKTMGWEASSERMYPEDGALKGEIKQRLKLKDGGHYDAEVKTTYKAKKPVQLPGAYNVNIKLDITSHNEDYTIVEQYERAEGRHSTGGMDELYK

SEQ ID NO: 148 - protein, 1552 aa, synthetic construct
  REGION 1..1552: note = SYNTHETIC
MTQFEGFTNLYQVSKTLRFELIPQGKTLKHIQEQGFIEEDKARNDHYKELKPIIDRIYKTYADQCLQLVQLDWENLSAAIDSYRKEKTEETRNALIEEQATYRNAIHDYFIGRTDNLTDAINKRHAEIYKGLFKAELFNGKVLKQLGTVTTTEHENALLRSFDKFTTYFSGFYENRKNVFSAEDISTAIPHRIVQDNFPKFKENCHIFTRLITAVPSLREHFENVKKAIGIFVSTSIEEVFSFPFYNQLLTQTQIDLYNQLLGGISREAGTEKIKGLNEVLNLAIQKNDETAHIIASLPHRFIPLFKQILSDRNTLSFILEEFKSDEEVIQSFCKYKTLLRNENVLETAEALFNELNSIDLTHIFISHKKLETISSALCDHWDTLRNALYERRISELTGKITKSAKEKVQRSLKHEDINLQEIISAAGKELSEAFKQKTSEILSHAHAALDQPLPTTLKKQEEKEILKSQLDSLLGLYHLLDWFAVDESNEVDPEFSARLTGIKLEMEPSLSFYNKARNYATKKPYSVEKFKLNFQMPTLASGWDVNKEKNNGAILFVKNGLYYLGIMPKQKGRYKALSFEPTEKTSEGFDKMYYDYFPDAAKMIPKCSTQLKAVTAHFQTHTTPILLSNNFIEPLEITKEIYDLNNPEKEPKKFQTAYAKKTGDQKGYREALCKWIDFTRDFLSKYTKTTSIDLSSLRPSSQYKDLGEYYAELNPLLYHISFQRIAEKEIMDAVETGKLYLFQIYNKDFAKGHHGKPNLHTLYWTGLFSPENLAKTSIKLNGQAELFYRPKSRMKRMAHRLGEKMLNKKLKDQKTPIPDTLYQELYDYVNHRLSHDLSDEARALLPNVITKEVSHEIIKDRRFTSDKFFFHVPITLNYQAANSPSKFNQRVNAYLKEHPETPIIGIDRGERNLIYITVIDSTGKILEQRSLNTIQQFDYQKKLDNREKERVAARQAWSVVGTIKDLKQGYLSQVIHEIVDLMIHYQAVVVLENLNFGFKSKRTGIAEKAVYQQFEKMLIDKLNCLVLKDYPAEKVGGVLNPYQLTDQFTSFAKMGTQSGFLFYVPAPYTSKIDPLTGFVDPFVWKTIKNHESRKHFLEGFDFLHYDVKTGDFILHFKMNRNLSFQRGLPGFMPAWDIVFEKNETQFDAKGTPFIAGKRIVPVIENHRFTGRYRDLYPANELIALLEEKGIVFRDGSNILPKLLENDDSHAIDTMVALIRSVLQMRNSNAATGEDYINSPVRDLNGVCFDSRFQNPEWPMDADANGAYHIALKGQLLLNHLKESKDLKLQNGISNQDWLAYIQELRNAPAPAPAPAMVSKGEEDNMAIIKEFMRFKVHMEGSVNGHEFEIEGEGEGRPYEGTQTAKLKVTKGGPLPFAWDILSPQFMYGSKAYVKHPADIPDYLKLSFPEGFKWERVMNFEDGGVVTVTQDSSLQDGEFIYKVKLRGTNFPSDGPVMQKKTMGWEASSERMYPEDGALKGEIKQRLKLKDGGHYDAEVKTTYKAKKPVQLPGAYNVNIKLDITSHNEDYTIVEQYERAEGRHSTGGMDELYK

SEQ ID NO: 149 - protein, 1554 aa, synthetic construct
  REGION 1..1554: note = SYNTHETIC
MTQFEGFTNLYQVSKTLRFELIPQGKTLKHIQEQGFIEEDKARNDHYKELKPIIDRIYKTYADQCLQLVQLDWENLSAAIDSYRKEKTEETRNALIEEQATYRNAIHDYFIGRTDNLTDAINKRHAEIYKGLFKAELFNGKVLKQLGTVTTTEHENALLRSFDKFTTYFSGFYENRKNVFSAEDISTAIPHRIVQDNFPKFKENCHIFTRLITAVPSLREHFENVKKAIGIFVSTSIEEVFSFPFYNQLLTQTQIDLYNQLLGGISREAGTEKIKGLNEVLNLAIQKNDETAHIIASLPHRFIPLFKQILSDRNTLSFILEEFKSDEEVIQSFCKYKTLLRNENVLETAEALFNELNSIDLTHIFISHKKLETISSALCDHWDTLRNALYERRISELTGKITKSAKEKVQRSLKHEDINLQEIISAAGKELSEAFKQKTSEILSHAHAALDQPLPTTLKKQEEKEILKSQLDSLLGLYHLLDWFAVDESNEVDPEFSARLTGIKLEMEPSLSFYNKARNYATKKPYSVEKFKLNFQMPTLASGWDVNKEKNNGAILFVKNGLYYLGIMPKQKGRYKALSFEPTEKTSEGFDKMYYDYFPDAAKMIPKCSTQLKAVTAHFQTHTTPILLSNNFIEPLEITKEIYDLNNPEKEPKKFQTAYAKKTGDQKGYREALCKWIDFTRDFLSKYTKTTSIDLSSLRPSSQYKDLGEYYAELNPLLYHISFQRIAEKEIMDAVETGKLYLFQIYNKDFAKGHHGKPNLHTLYWTGLFSPENLAKTSIKLNGQAELFYRPKSRMKRMAHRLGEKMLNKKLKDQKTPIPDTLYQELYDYVNHRLSHDLSDEARALLPNVITKEVSHEIIKDRRFTSDKFFFHVPITLNYQAANSPSKFNQRVNAYLKEHPETPIIGIDRGERNLIYITVIDSTGKILEQRSLNTIQQFDYQKKLDNREKERVAARQAWSVVGTIKDLKQGYLSQVIHEIVDLMIHYQAVVVLENLNFGFKSKRTGIAEKAVYQQFEKMLIDKLNCLVLKDYPAEKVGGVLNPYQLTDQFTSFAKMGTQSGFLFYVPAPYTSKIDPLTGFVDPFVWKTIKNHESRKHFLEGFDFLHYDVKTGDFILHFKMNRNLSFQRGLPGFMPAWDIVFEKNETQFDAKGTPFIAGKRIVPVIENHRFTGRYRDLYPANELIALLEEKGIVFRDGSNILPKLLENDDSHAIDTMVALIRSVLQMRNSNAATGEDYINSPVRDLNGVCFDSRFQNPEWPMDADANGAYHIALKGQLLLNHLKESKDLKLQNGISNQDWLAYIQELRNAPAPAPAPAPAMVSKGEEDNMAIIKEFMRFKVHMEGSVNGHEFEIEGEGEGRPYEGTQTAKLKVTKGGPLPFAWDILSPQFMYGSKAYVKHPADIPDYLKLSFPEGFKWERVMNFEDGGVVTVTQDSSLQDGEFIYKVKLRGTNFPSDGPVMQKKTMGWEASSERMYPEDGALKGEIKQRLKLKDGGHYDAEVKTTYKAKKPVQLPGAYNVNIKLDITSHNEDYTIVEQYERAEGRHSTGGMDELYK

SEQ ID NO: 150 - protein, 1556 aa, synthetic construct
  REGION 1..1556: note = SYNTHETIC
MTQFEGFTNLYQVSKTLRFELIPQGKTLKHIQEQGFIEEDKARNDHYKELKPIIDRIYKTYADQCLQLVQLDWENLSAAIDSYRKEKTEETRNALIEEQATYRNAIHDYFIGRTDNLTDAINKRHAEIYKGLFKAELFNGKVLKQLGTVTTTEHENALLRSFDKFTTYFSGFYENRKNVFSAEDISTAIPHRIVQDNFPKFKENCHIFTRLITAVPSLREHFENVKKAIGIFVSTSIEEVFSFPFYNQLLTQTQIDLYNQLLGGISREAGTEKIKGLNEVLNLAIQKNDETAHIIASLPHRFIPLFKQILSDRNTLSFILEEFKSDEEVIQSFCKYKTLLRNENVLETAEALFNELNSIDLTHIFISHKKLETISSALCDHWDTLRNALYERRISELTGKITKSAKEKVQRSLKHEDINLQEIISAAGKELSEAFKQKTSEILSHAHAALDQPLPTTLKKQEEKEILKSQLDSLLGLYHLLDWFAVDESNEVDPEFSARLTGIKLEMEPSLSFYNKARNYATKKPYSVEKFKLNFQMPTLASGWDVNKEKNNGAILFVKNGLYYLGIMPKQKGRYKALSFEPTEKTSEGFDKMYYDYFPDAAKMIPKCSTQLKAVTAHFQTHTTPILLSNNFIEPLEITKEIYDLNNPEKEPKKFQTAYAKKTGDQKGYREALCKWIDFTRDFLSKYTKTTSIDLSSLRPSSQYKDLGEYYAELNPLLYHISFQRIAEKEIMDAVETGKLYLFQIYNKDFAKGHHGKPNLHTLYWTGLFSPENLAKTSIKLNGQAELFYRPKSRMKRMAHRLGEKMLNKKLKDQKTPIPDTLYQELYDYVNHRLSHDLSDEARALLPNVITKEVSHEIIKDRRFTSDKFFFHVPITLNYQAANSPSKFNQRVNAYLKEHPETPIIGIDRGERNLIYITVIDSTGKILEQRSLNTIQQFDYQKKLDNREKERVAARQAWSVVGTIKDLKQGYLSQVIHEIVDLMIHYQAVVVLENLNFGFKSKRTGIAEKAVYQQFEKMLIDKLNCLVLKDYPAEKVGGVLNPYQLTDQFTSFAKMGTQSGFLFYVPAPYTSKIDPLTGFVDPFVWKTIKNHESRKHFLEGFDFLHYDVKTGDFILHFKMNRNLSFQRGLPGFMPAWDIVFEKNETQFDAKGTPFIAGKRIVPVIENHRFTGRYRDLYPANELIALLEEKGIVFRDGSNILPKLLENDDSHAIDTMVALIRSVLQMRNSNAATGEDYINSPVRDLNGVCFDSRFQNPEWPMDADANGAYHIALKGQLLLNHLKESKDLKLQNGISNQDWLAYIQELRNAPAPAPAPAPAPAMVSKGEEDNMAIIKEFMRFKVHMEGSVNGHEFEIEGEGEGRPYEGTQTAKLKVTKGGPLPFAWDILSPQFMYGSKAYVKHPADIPDYLKLSFPEGFKWERVMNFEDGGVVTVTQDSSLQDGEFIYKVKLRGTNFPSDGPVMQKKTMGWEASSERMYPEDGALKGEIKQRLKLKDGGHYDAEVKTTYKAKKPVQLPGAYNVNIKLDITSHNEDYTIVEQYERAEGRHSTGGMDELYK

SEQ ID NO: 151 - protein, 1558 aa, synthetic construct
  REGION 1..1558: note = SYNTHETIC
MTQFEGFTNLYQVSKTLRFELIPQGKTLKHIQEQGFIEEDKARNDHYKELKPIIDRIYKTYADQCLQLVQLDWENLSAAIDSYRKEKTEETRNALIEEQATYRNAIHDYFIGRTDNLTDAINKRHAEIYKGLFKAELFNGKVLKQLGTVTTTEHENALLRSFDKFTTYFSGFYENRKNVFSAEDISTAIPHRIVQDNFPKFKENCHIFTRLITAVPSLREHFENVKKAIGIFVSTSIEEVFSFPFYNQLLTQTQIDLYNQLLGGISREAGTEKIKGLNEVLNLAIQKNDETAHIIASLPHRFIPLFKQILSDRNTLSFILEEFKSDEEVIQSFCKYKTLLRNENVLETAEALFNELNSIDLTHIFISHKKLETISSALCDHWDTLRNALYERRISELTGKITKSAKEKVQRSLKHEDINLQEIISAAGKELSEAFKQKTSEILSHAHAALDQPLPTTLKKQEEKEILKSQLDSLLGLYHLLDWFAVDESNEVDPEFSARLTGIKLEMEPSLSFYNKARNYATKKPYSVEKFKLNFQMPTLASGWDVNKEKNNGAILFVKNGLYYLGIMPKQKGRYKALSFEPTEKTSEGFDKMYYDYFPDAAKMIPKCSTQLKAVTAHFQTHTTPILLSNNFIEPLEITKEIYDLNNPEKEPKKFQTAYAKKTGDQKGYREALCKWIDFTRDFLSKYTKTTSIDLSSLRPSSQYKDLGEYYAELNPLLYHISFQRIAEKEIMDAVETGKLYLFQIYNKDFAKGHHGKPNLHTLYWTGLFSPENLAKTSIKLNGQAELFYRPKSRMKRMAHRLGEKMLNKKLKDQKTPIPDTLYQELYDYVNHRLSHDLSDEARALLPNVITKEVSHEIIKDRRFTSDKFFFHVPITLNYQAANSPSKFNQRVNAYLKEHPETPIIGIDRGERNLIYITVIDSTGKILEQRSLNTIQQFDYQKKLDNREKERVAARQAWSVVGTIKDLKQGYLSQVIHEIVDLMIHYQAVVVLENLNFGFKSKRTGIAEKAVYQQFEKMLIDKLNCLVLKDYPAEKVGGVLNPYQLTDQFTSFAKMGTQSGFLFYVPAPYTSKIDPLTGFVDPFVWKTIKNHESRKHFLEGFDFLHYDVKTGDFILHFKMNRNLSFQRGLPGFMPAWDIVFEKNETQFDAKGTPFIAGKRIVPVIENHRFTGRYRDLYPANELIALLEEKGIVFRDGSNILPKLLENDDSHAIDTMVALIRSVLQMRNSNAATGEDYINSPVRDLNGVCFDSRFQNPEWPMDADANGAYHIALKGQLLLNHLKESKDLKLQNGISNQDWLAYIQELRNAPAPAPAPAPAPAPAMVSKGEEDNMAIIKEFMRFKVHMEGSVNGHEFEIEGEGEGRPYEGTQTAKLKVTKGGPLPFAWDILSPQFMYGSKAYVKHPADIPDYLKLSFPEGFKWERVMNFEDGGVVTVTQDSSLQDGEFIYKVKLRGTNFPSDGPVMQKKTMGWEASSERMYPEDGALKGEIKQRLKLKDGGHYDAEVKTTYKAKKPVQLPGAYNVNIKLDITSHNEDYTIVEQYERAEGRHSTGGMDELYK

SEQ ID NO: 152 - protein, 1560 aa, synthetic construct
  REGION 1..1560: note = SYNTHETIC
MTQFEGFTNLYQVSKTLRFELIPQGKTLKHIQEQGFIEEDKARNDHYKELKPIIDRIYKTYADQCLQLVQLDWENLSAAIDSYRKEKTEETRNALIEEQATYRNAIHDYFIGRTDNLTDAINKRHAEIYKGLFKAELFNGKVLKQLGTVTTTEHENALLRSFDKFTTYFSGFYENRKNVFSAEDISTAIPHRIVQDNFPKFKENCHIFTRLITAVPSLREHFENVKKAIGIFVSTSIEEVFSFPFYNQLLTQTQIDLYNQLLGGISREAGTEKIKGLNEVLNLAIQKNDETAHIIASLPHRFIPLFKQILSDRNTLSFILEEFKSDEEVIQSFCKYKTLLRNENVLETAEALFNELNSIDLTHIFISHKKLETISSALCDHWDTLRNALYERRISELTGKITKSAKEKVQRSLKHEDINLQEIISAAGKELSEAFKQKTSEILSHAHAALDQPLPTTLKKQEEKEILKSQLDSLLGLYHLLDWFAVDESNEVDPEFSARLTGIKLEMEPSLSFYNKARNYATKKPYSVEKFKLNFQMPTLASGWDVNKEKNNGAILFVKNGLYYLGIMPKQKGRYKALSFEPTEKTSEGFDKMYYDYFPDAAKMIPKCSTQLKAVTAHFQTHTTPILLSNNFIEPLEITKEIYDLNNPEKEPKKFQTAYAKKTGDQKGYREALCKWIDFTRDFLSKYTKTTSIDLSSLRPSSQYKDLGEYYAELNPLLYHISFQRIAEKEIMDAVETGKLYLFQIYNKDFAKGHHGKPNLHTLYWTGLFSPENLAKTSIKLNGQAELFYRPKSRMKRMAHRLGEKMLNKKLKDQKTPIPDTLYQELYDYVNHRLSHDLSDEARALLPNVITKEVSHEIIKDRRFTSDKFFFHVPITLNYQAANSPSKFNQRVNAYLKEHPETPIIGIDRGERNLIYITVIDSTGKILEQRSLNTIQQFDYQKKLDNREKERVAARQAWSVVGTIKDLKQGYLSQVIHEIVDLMIHYQAVVVLENLNFGFKSKRTGIAEKAVYQQFEKMLIDKLNCLVLKDYPAEKVGGVLNPYQLTDQFTSFAKMGTQSGFLFYVPAPYTSKIDPLTGFVDPFVWKTIKNHESRKHFLEGFDFLHYDVKTGDFILHFKMNRNLSFQRGLPGFMPAWDIVFEKNETQFDAKGTPFIAGKRIVPVIENHRFTGRYRDLYPANELIALLEEKGIVFRDGSNILPKLLENDDSHAIDTMVALIRSVLQMRNSNAATGEDYINSPVRDLNGVCFDSRFQNPEWPMDADANGAYHIALKGQLLLNHLKESKDLKLQNGISNQDWLAYIQELRNAPAPAPAPAPAPAPAPAMVSKGEEDNMAIIKEFMRFKVHMEGSVNGHEFEIEGEGEGRPYEGTQTAKLKVTKGGPLPFAWDILSPQFMYGSKAYVKHPADIPDYLKLSFPEGFKWERVMNFEDGGVVTVTQDSSLQDGEFIYKVKLRGTNFPSDGPVMQKKTMGWEASSERMYPEDGALKGEIKQRLKLKDGGHYDAEVKTTYKAKKPVQLPGAYNVNIKLDITSHNEDYTIVEQYERAEGRHSTGGMDELYK

SEQ ID NO: 153 - protein, 1562 aa, synthetic construct
  REGION 1..1562: note = SYNTHETIC
MTQFEGFTNLYQVSKTLRFELIPQGKTLKHIQEQGFIEEDKARNDHYKELKPIIDRIYKTYADQCLQLVQLDWENLSAAIDSYRKEKTEETRNALIEEQATYRNAIHDYFIGRTDNLTDAINKRHAEIYKGLFKAELFNGKVLKQLGTVTTTEHENALLRSFDKFTTYFSGFYENRKNVFSAEDISTAIPHRIVQDNFPKFKENCHIFTRLITAVPSLREHFENVKKAIGIFVSTSIEEVFSFPFYNQLLTQTQIDLYNQLLGGISREAGTEKIKGLNEVLNLAIQKNDETAHIIASLPHRFIPLFKQILSDRNTLSFILEEFKSDEEVIQSFCKYKTLLRNENVLETAEALFNELNSIDLTHIFISHKKLETISSALCDHWDTLRNALYERRISELTGKITKSAKEKVQRSLKHEDINLQEIISAAGKELSEAFKQKTSEILSHAHAALDQPLPTTLKKQEEKEILKSQLDSLLGLYHLLDWFAVDESNEVDPEFSARLTGIKLEMEPSLSFYNKARNYATKKPYSVEKFKLNFQMPTLASGWDVNKEKNNGAILFVKNGLYYLGIMPKQKGRYKALSFEPTEKTSEGFDKMYYDYFPDAAKMIPKCSTQLKAVTAHFQTHTTPILLSNNFIEPLEITKEIYDLNNPEKEPKKFQTAYAKKTGDQKGYREALCKWIDFTRDFLSKYTKTTSIDLSSLRPSSQYKDLGEYYAELNPLLYHISFQRIAEKEIMDAVETGKLYLFQIYNKDFAKGHHGKPNLHTLYWTGLFSPENLAKTSIKLNGQAELFYRPKSRMKRMAHRLGEKMLNKKLKDQKTPIPDTLYQELYDYVNHRLSHDLSDEARALLPNVITKEVSHEIIKDRRFTSDKFFFHVPITLNYQAANSPSKFNQRVNAYLKEHPETPIIGIDRGERNLIYITVIDSTGKILEQRSLNTIQQFDYQKKLDNREKERVAARQAWSVVGTIKDLKQGYLSQVIHEIVDLMIHYQAVVVLENLNFGFKSKRTGIAEKAVYQQFEKMLIDKLNCLVLKDYPAEKVGGVLNPYQLTDQFTSFAKMGTQSGFLFYVPAPYTSKIDPLTGFVDPFVWKTIKNHESRKHFLEGFDFLHYDVKTGDFILHFKMNRNLSFQRGLPGFMPAWDIVFEKNETQFDAKGTPFIAGKRIVPVIENHRFTGRYRDLYPANELIALLEEKGIVFRDGSNILPKLLENDDSHAIDTMVALIRSVLQMRNSNAATGEDYINSPVRDLNGVCFDSRFQNPEWPMDADANGAYHIALKGQLLLNHLKESKDLKLQNGISNQDWLAYIQELRNAPAPAPAPAPAPAPAPAPAMVSKGEEDNMAIIKEFMRFKVHMEGSVNGHEFEIEGEGEGRPYEGTQTAKLKVTKGGPLPFAWDILSPQFMYGSKAYVKHPADIPDYLKLSFPEGFKWERVMNFEDGGVVTVTQDSSLQDGEFIYKVKLRGTNFPSDGPVMQKKTMGWEASSERMYPEDGALKGEIKQRLKLKDGGHYDAEVKTTYKAKKPVQLPGAYNVNIKLDITSHNEDYTIVEQYERAEGRHSTGGMDELYK

SEQ ID NO: 154 - protein, 1564 aa, synthetic construct
  REGION 1..1564: note = SYNTHETIC
MTQFEGFTNLYQVSKTLRFELIPQGKTLKHIQEQGFIEEDKARNDHYKELKPIIDRIYKTYADQCLQLVQLDWENLSAAIDSYRKEKTEETRNALIEEQATYRNAIHDYFIGRTDNLTDAINKRHAEIYKGLFKAELFNGKVLKQLGTVTTTEHENALLRSFDKFTTYFSGFYENRKNVFSAEDISTAIPHRIVQDNFPKFKENCHIFTRLITAVPSLREHFENVKKAIGIFVSTSIEEVFSFPFYNQLLTQTQIDLYNQLLGGISREAGTEKIKGLNEVLNLAIQKNDETAHIIASLPHRFIPLFKQILSDRNTLSFILEEFKSDEEVIQSFCKYKTLLRNENVLETAEALFNELNSIDLTHIFISHKKLETISSALCDHWDTLRNALYERRISELTGKITKSAKEKVQRSLKHEDINLQEIISAAGKELSEAFKQKTSEILSHAHAALDQPLPTTLKKQEEKEILKSQLDSLLGLYHLLDWFAVDESNEVDPEFSARLTGIKLEMEPSLSFYNKARNYATKKPYSVEKFKLNFQMPTLASGWDVNKEKNNGAILFVKNGLYYLGIMPKQKGRYKALSFEPTEKTSEGFDKMYYDYFPDAAKMIPKCSTQLKAVTAHFQTHTTPILLSNNFIEPLEITKEIYDLNNPEKEPKKFQTAYAKKTGDQKGYREALCKWIDFTRDFLSKYTKTTSIDLSSLRPSSQYKDLGEYYAELNPLLYHISFQRIAEKEIMDAVETGKLYLFQIYNKDFAKGHHGKPNLHTLYWTGLFSPENLAKTSIKLNGQAELFYRPKSRMKRMAHRLGEKMLNKKLKDQKTPIPDTLYQELYDYVNHRLSHDLSDEARALLPNVITKEVSHEIIKDRRFTSDKFFFHVPITLNYQAANSPSKFNQRVNAYLKEHPETPIIGIDRGERNLIYITVIDSTGKILEQRSLNTIQQFDYQKKLDNREKERVAARQAWSVVGTIKDLKQGYLSQVIHEIVDLMIHYQAVVVLENLNFGFKSKRTGIAEKAVYQQFEKMLIDKLNCLVLKDYPAEKVGGVLNPYQLTDQFTSFAKMGTQSGFLFYVPAPYTSKIDPLTGFVDPFVWKTIKNHESRKHFLEGFDFLHYDVKTGDFILHFKMNRNLSFQRGLPGFMPAWDIVFEKNETQFDAKGTPFIAGKRIVPVIENHRFTGRYRDLYPANELIALLEEKGIVFRDGSNILPKLLENDDSHAIDTMVALIRSVLQMRNSNAATGEDYINSPVRDLNGVCFDSRFQNPEWPMDADANGAYHIALKGQLLLNHLKESKDLKLQNGISNQDWLAYIQELRNAPAPAPAPAPAPAPAPAPAPAMVSKGEEDNMAIIKEFMRFKVHMEGSVNGHEFEIEGEGEGRPYEGTQTAKLKVTKGGPLPFAWDILSPQFMYGSKAYVKHPADIPDYLKLSFPEGFKWERVMNFEDGGVVTVTQDSSLQDGEFIYKVKLRGTNFPSDGPVMQKKTMGWEASSERMYPEDGALKGEIKQRLKLKDGGHYDAEVKTTYKAKKPVQLPGAYNVNIKLDITSHNEDYTIVEQYERAEGRHSTGGMDELYK

SEQ ID NO: 155 - protein, 1566 aa, synthetic construct
  REGION 1..1566: note = SYNTHETIC
MTQFEGFTNLYQVSKTLRFELIPQGKTLKHIQEQGFIEEDKARNDHYKELKPIIDRIYKTYADQCLQLVQLDWENLSAAIDSYRKEKTEETRNALIEEQATYRNAIHDYFIGRTDNLTDAINKRHAEIYKGLFKAELFNGKVLKQLGTVTTTEHENALLRSFDKFTTYFSGFYENRKNVFSAEDISTAIPHRIVQDNFPKFKENCHIFTRLITAVPSLREHFENVKKAIGIFVSTSIEEVFSFPFYNQLLTQTQIDLYNQLLGGISREAGTEKIKGLNEVLNLAIQKNDETAHIIASLPHRFIPLFKQILSDRNTLSFILEEFKSDEEVIQSFCKYKTLLRNENVLETAEALFNELNSIDLTHIFISHKKLETISSALCDHWDTLRNALYERRISELTGKITKSAKEKVQRSLKHEDINLQEIISAAGKELSEAFKQKTSEILSHAHAALDQPLPTTLKKQEEKEILKSQLDSLLGLYHLLDWFAVDESNEVDPEFSARLTGIKLEMEPSLSFYNKARNYATKKPYSVEKFKLNFQMPTLASGWDVNKEKNNGAILFVKNGLYYLGIMPKQKGRYKALSFEPTEKTSEGFDKMYYDYFPDAAKMIPKCSTQLKAVTAHFQTHTTPILLSNNFIEPLEITKEIYDLNNPEKEPKKFQTAYAKKTGDQKGYREALCKWIDFTRDFLSKYTKTTSIDLSSLRPSSQYKDLGEYYAELNPLLYHISFQRIAEKEIMDAVETGKLYLFQIYNKDFAKGHHGKPNLHTLYWTGLFSPENLAKTSIKLNGQAELFYRPKSRMKRMAHRLGEKMLNKKLKDQKTPIPDTLYQELYDYVNHRLSHDLSDEARALLPNVITKEVSHEIIKDRRFTSDKFFFHVPITLNYQAANSPSKFNQRVNAYLKEHPETPIIGIDRGERNLIYITVIDSTGKILEQRSLNTIQQFDYQKKLDNREKERVAARQAWSVVGTIKDLKQGYLSQVIHEIVDLMIHYQAVVVLENLNFGFKSKRTGIAEKAVYQQFEKMLIDKLNCLVLKDYPAEKVGGVLNPYQLTDQFTSFAKMGTQSGFLFYVPAPYTSKIDPLTGFVDPFVWKTIKNHESRKHFLEGFDFLHYDVKTGDFILHFKMNRNLSFQRGLPGFMPAWDIVFEKNETQFDAKGTPFIAGKRIVPVIENHRFTGRYRDLYPANELIALLEEKGIVFRDGSNILPKLLENDDSHAIDTMVALIRSVLQMRNSNAATGEDYINSPVRDLNGVCFDSRFQNPEWPMDADANGAYHIALKGQLLLNHLKESKDLKLQNGISNQDWLAYIQELRNAPAPAPAPAPAPAPAPAPAPAPAMVSKGEEDNMAIIKEFMRFKVHMEGSVNGHEFEIEGEGEGRPYEGTQTAKLKVTKGGPLPFAWDILSPQFMYGSKAYVKHPADIPDYLKLSFPEGFKWERVMNFEDGGVVTVTQDSSLQDGEFIYKVKLRGTNFPSDGPVMQKKTMGWEASSERMYPEDGALKGEIKQRLKLKDGGHYDAEVKTTYKAKKPVQLPGAYNVNIKLDITSHNEDYTIVEQYERAEGRHSTGGMDELYK

SEQ ID NO: 156 - protein, 1568 aa, synthetic construct
  REGION 1..1568: note = SYNTHETIC
MTQFEGFTNLYQVSKTLRFELIPQGKTLKHIQEQGFIEEDKARNDHYKELKPIIDRIYKTYADQCLQLVQLDWENLSAAIDSYRKEKTEETRNALIEEQATYRNAIHDYFIGRTDNLTDAINKRHAEIYKGLFKAELFNGKVLKQLGTVTTTEHENALLRSFDKFTTYFSGFYENRKNVFSAEDISTAIPHRIVQDNFPKFKENCHIFTRLITAVPSLREHFENVKKAIGIFVSTSIEEVFSFPFYNQLLTQTQIDLYNQLLGGISREAGTEKIKGLNEVLNLAIQKNDETAHIIASLPHRFIPLFKQILSDRNTLSFILEEFKSDEEVIQSFCKYKTLLRNENVLETAEALFNELNSIDLTHIFISHKKLETISSALCDHWDTLRNALYERRISELTGKITKSAKEKVQRSLKHEDINLQEIISAAGKELSEAFKQKTSEILSHAHAALDQPLPTTLKKQEEKEILKSQLDSLLGLYHLLDWFAVDESNEVDPEFSARLTGIKLEMEPSLSFYNKARNYATKKPYSVEKFKLNFQMPTLASGWDVNKEKNNGAILFVKNGLYYLGIMPKQKGRYKALSFEPTEKTSEGFDKMYYDYFPDAAKMIPKCSTQLKAVTAHFQTHTTPILLSNNFIEPLEITKEIYDLNNPEKEPKKFQTAYAKKTGDQKGYREALCKWIDFTRDFLSKYTKTTSIDLSSLRPSSQYKDLGEYYAELNPLLYHISFQRIAEKEIMDAVETGKLYLFQIYNKDFAKGHHGKPNLHTLYWTGLFSPENLAKTSIKLNGQAELFYRPKSRMKRMAHRLGEKMLNKKLKDQKTPIPDTLYQELYDYVNHRLSHDLSDEARALLPNVITKEVSHEIIKDRRFTSDKFFFHVPITLNYQAANSPSKFNQRVNAYLKEHPETPIIGIDRGERNLIYITVIDSTGKILEQRSLNTIQQFDYQKKLDNREKERVAARQAWSVVGTIKDLKQGYLSQVIHEIVDLMIHYQAVVVLENLNFGFKSKRTGIAEKAVYQQFEKMLIDKLNCLVLKDYPAEKVGGVLNPYQLTDQFTSFAKMGTQSGFLFYVPAPYTSKIDPLTGFVDPFVWKTIKNHESRKHFLEGFDFLHYDVKTGDFILHFKMNRNLSFQRGLPGFMPAWDIVFEKNETQFDAKGTPFIAGKRIVPVIENHRFTGRYRDLYPANELIALLEEKGIVFRDGSNILPKLLENDDSHAIDTMVALIRSVLQMRNSNAATGEDYINSPVRDLNGVCFDSRFQNPEWPMDADANGAYHIALKGQLLLNHLKESKDLKLQNGISNQDWLAYIQELRNAPAPAPAPAPAPAPAPAPAPAPAPAMVSKGEEDNMAIIKEFMRFKVHMEGSVNGHEFEIEGEGEGRPYEGTQTAKLKVTKGGPLPFAWDILSPQFMYGSKAYVKHPADIPDYLKLSFPEGFKWERVMNFEDGGVVTVTQDSSLQDGEFIYKVKLRGTNFPSDGPVMQKKTMGWEASSERMYPEDGALKGEIKQRLKLKDGGHYDAEVKTTYKAKKPVQLPGAYNVNIKLDITSHNEDYTIVEQYERAEGRHSTGGMDELYK

SEQ ID NO: 157 - protein, 1570 aa, synthetic construct
  REGION 1..1570: note = SYNTHETIC
MTQFEGFTNLYQVSKTLRFELIPQGKTLKHIQEQGFIEEDKARNDHYKELKPIIDRIYKTYADQCLQLVQLDWENLSAAIDSYRKEKTEETRNALIEEQATYRNAIHDYFIGRTDNLTDAINKRHAEIYKGLFKAELFNGKVLKQLGTVTTTEHENALLRSFDKFTTYFSGFYENRKNVFSAEDISTAIPHRIVQDNFPKFKENCHIFTRLITAVPSLREHFENVKKAIGIFVSTSIEEVFSFPFYNQLLTQTQIDLYNQLLGGISREAGTEKIKGLNEVLNLAIQKNDETAHIIASLPHRFIPLFKQILSDRNTLSFILEEFKSDEEVIQSFCKYKTLLRNENVLETAEALFNELNSIDLTHIFISHKKLETISSALCDHWDTLRNALYERRISELTGKITKSAKEKVQRSLKHEDINLQEIISAAGKELSEAFKQKTSEILSHAHAALDQPLPTTLKKQEEKEILKSQLDSLLGLYHLLDWFAVDESNEVDPEFSARLTGIKLEMEPSLSFYNKARNYATKKPYSVEKFKLNFQMPTLASGWDVNKEKNNGAILFVKNGLYYLGIMPKQKGRYKALSFEPTEKTSEGFDKMYYDYFPDAAKMIPKCSTQLKAVTAHFQTHTTPILLSNNFIEPLEITKEIYDLNNPEKEPKKFQTAYAKKTGDQKGYREALCKWIDFTRDFLSKYTKTTSIDLSSLRPSSQYKDLGEYYAELNPLLYHISFQRIAEKEIMDAVETGKLYLFQIYNKDFAKGHHGKPNLHTLYWTGLFSPENLAKTSIKLNGQAELFYRPKSRMKRMAHRLGEKMLNKKLKDQKTPIPDTLYQELYDYVNHRLSHDLSDEARALLPNVITKEVSHEIIKDRRFTSDKFFFHVPITLNYQAANSPSKFNQRVNAYLKEHPETPIIGIDRGERNLIYITVIDSTGKILEQRSLNTIQQFDYQKKLDNREKERVAARQAWSVVGTIKDLKQGYLSQVIHEIVDLMIHYQAVVVLENLNFGFKSKRTGIAEKAVYQQFEKMLIDKLNCLVLKDYPAEKVGGVLNPYQLTDQFTSFAKMGTQSGFLFYVPAPYTSKIDPLTGFVDPFVWKTIKNHESRKHFLEGFDFLHYDVKTGDFILHFKMNRNLSFQRGLPGFMPAWDIVFEKNETQFDAKGTPFIAGKRIVPVIENHRFTGRYRDLYPANELIALLEEKGIVFRDGSNILPKLLENDDSHAIDTMVALIRSVLQMRNSNAATGEDYINSPVRDLNGVCFDSRFQNPEWPMDADANGAYHIALKGQLLLNHLKESKDLKLQNGISNQDWLAYIQELRNAPAPAPAPAPAPAPAPAPAPAPAPAPAMVSKGEEDNMAIIKEFMRFKVHMEGSVNGHEFEIEGEGEGRPYEGTQTAKLKVTKGGPLPFAWDILSPQFMYGSKAYVKHPADIPDYLKLSFPEGFKWERVMNFEDGGVVTVTQDSSLQDGEFIYKVKLRGTNFPSDGPVMQKKTMGWEASSERMYPEDGALKGEIKQRLKLKDGGHYDAEVKTTYKAKKPVQLPGAYNVNIKLDITSHNEDYTIVEQYERAEGRHSTGGMDELYK

SEQ ID NO: 158 - protein, 1572 aa, synthetic construct
  REGION 1..1572: note = SYNTHETIC
MTQFEGFTNLYQVSKTLRFELIPQGKTLKHIQEQGFIEEDKARNDHYKELKPIIDRIYKTYADQCLQLVQLDWENLSAAIDSYRKEKTEETRNALIEEQATYRNAIHDYFIGRTDNLTDAINKRHAEIYKGLFKAELFNGKVLKQLGTVTTTEHENALLRSFDKFTTYFSGFYENRKNVFSAEDISTAIPHRIVQDNFPKFKENCHIFTRLITAVPSLREHFENVKKAIGIFVSTSIEEVFSFPFYNQLLTQTQIDLYNQLLGGISREAGTEKIKGLNEVLNLAIQKNDETAHIIASLPHRFIPLFKQILSDRNTLSFILEEFKSDEEVIQSFCKYKTLLRNENVLETAEALFNELNSIDLTHIFISHKKLETISSALCDHWDTLRNALYERRISELTGKITKSAKEKVQRSLKHEDINLQEIISAAGKELSEAFKQKTSEILSHAHAALDQPLPTTLKKQEEKEILKSQLDSLLGLYHLLDWFAVDESNEVDPEFSARLTGIKLEMEPSLSFYNKARNYATKKPYSVEKFKLNFQMPTLASGWDVNKEKNNGAILFVKNGLYYLGIMPKQKGRYKALSFEPTEKTSEGFDKMYYDYFPDAAKMIPKCSTQLKAVTAHFQTHTTPILLSNNFIEPLEITKEIYDLNNPEKEPKKFQTAYAKKTGDQKGYREALCKWIDFTRDFLSKYTKTTSIDLSSLRPSSQYKDLGEYYAELNPLLYHISFQRIAEKEIMDAVETGKLYLFQIYNKDFAKGHHGKPNLHTLYWTGLFSPENLAKTSIKLNGQAELFYRPKSRMKRMAHRLGEKMLNKKLKDQKTPIPDTLYQELYDYVNHRLSHDLSDEARALLPNVITKEVSHEIIKDRRFTSDKFFFHVPITLNYQAANSPSKFNQRVNAYLKEHPETPIIGIDRGERNLIYITVIDSTGKILEQRSLNTIQQFDYQKKLDNREKERVAARQAWSVVGTIKDLKQGYLSQVIHEIVDLMIHYQAVVVLENLNFGFKSKRTGIAEKAVYQQFEKMLIDKLNCLVLKDYPAEKVGGVLNPYQLTDQFTSFAKMGTQSGFLFYVPAPYTSKIDPLTGFVDPFVWKTIKNHESRKHFLEGFDFLHYDVKTGDFILHFKMNRNLSFQRGLPGFMPAWDIVFEKNETQFDAKGTPFIAGKRIVPVIENHRFTGRYRDLYPANELIALLEEKGIVFRDGSNILPKLLENDDSHAIDTMVALIRSVLQMRNSNAATGEDYINSPVRDLNGVCFDSRFQNPEWPMDADANGAYHIALKGQLLLNHLKESKDLKLQNGISNQDWLAYIQELRNAPAPAPAPAPAPAPAPAPAPAPAPAPAPAMVSKGEEDNMAIIKEFMRFKVHMEGSVNGHEFEIEGEGEGRPYEGTQTAKLKVTKGGPLPFAWDILSPQFMYGSKAYVKHPADIPDYLKLSFPEGFKWERVMNFEDGGVVTVTQDSSLQDGEFIYKVKLRGTNFPSDGPVMQKKTMGWEASSERMYPEDGALKGEIKQRLKLKDGGHYDAEVKTTYKAKKPVQLPGAYNVNIKLDITSHNEDYTIVEQYERAEGRHSTGGMDELYK

SEQ ID NO: 159 - protein, 1545 aa, synthetic construct
  REGION 1..1545: note = SYNTHETIC
  VARIANT 1308: note = X can be any naturally occurring amino acid
MTQFEGFTNLYQVSKTLRFELIPQGKTLKHIQEQGFIEEDKARNDHYKELKPIIDRIYKTYADQCLQLVQLDWENLSAAIDSYRKEKTEETRNALIEEQATYRNAIHDYFIGRTDNLTDAINKRHAEIYKGLFKAELFNGKVLKQLGTVTTTEHENALLRSFDKFTTYFSGFYENRKNVFSAEDISTAIPHRIVQDNFPKFKENCHIFTRLITAVPSLREHFENVKKAIGIFVSTSIEEVFSFPFYNQLLTQTQIDLYNQLLGGISREAGTEKIKGLNEVLNLAIQKNDETAHIIASLPHRFIPLFKQILSDRNTLSFILEEFKSDEEVIQSFCKYKTLLRNENVLETAEALFNELNSIDLTHIFISHKKLETISSALCDHWDTLRNALYERRISELTGKITKSAKEKVQRSLKHEDINLQEIISAAGKELSEAFKQKTSEILSHAHAALDQPLPTTLKKQEEKEILKSQLDSLLGLYHLLDWFAVDESNEVDPEFSARLTGIKLEMEPSLSFYNKARNYATKKPYSVEKFKLNFQMPTLASGWDVNKEKNNGAILFVKNGLYYLGIMPKQKGRYKALSFEPTEKTSEGFDKMYYDYFPDAAKMIPKCSTQLKAVTAHFQTHTTPILLSNNFIEPLEITKEIYDLNNPEKEPKKFQTAYAKKTGDQKGYREALCKWIDFTRDFLSKYTKTTSIDLSSLRPSSQYKDLGEYYAELNPLLYHISFQRIAEKEIMDAVETGKLYLFQIYNKDFAKGHHGKPNLHTLYWTGLFSPENLAKTSIKLNGQAELFYRPKSRMKRMAHRLGEKMLNKKLKDQKTPIPDTLYQELYDYVNHRLSHDLSDEARALLPNVITKEVSHEIIKDRRFTSDKFFFHVPITLNYQAANSPSKFNQRVNAYLKEHPETPIIGIDRGERNLIYITVIDSTGKILEQRSLNTIQQFDYQKKLDNREKERVAARQAWSVVGTIKDLKQGYLSQVIHEIVDLMIHYQAVVVLENLNFGFKSKRTGIAEKAVYQQFEKMLIDKLNCLVLKDYPAEKVGGVLNPYQLTDQFTSFAKMGTQSGFLFYVPAPYTSKIDPLTGFVDPFVWKTIKNHESRKHFLEGFDFLHYDVKTGDFILHFKMNRNLSFQRGLPGFMPAWDIVFEKNETQFDAKGTPFIAGKRIVPVIENHRFTGRYRDLYPANELIALLEEKGIVFRDGSNILPKLLENDDSHAIDTMVALIRSVLQMRNSNAATGEDYINSPVRDLNGVCFDSRFQNPEWPMDADANGAYHIALKGQLLLNHLKESKDLKLQNGISNQDWLAYIQELRNXPMVSKGEEDNMAIIKEFMRFKVHMEGSVNGHEFEIEGEGEGRPYEGTQTAKLKVTKGGPLPFAWDILSPQFMYGSKAYVKHPADIPDYLKLSFPEGFKWERVMNFEDGGVVTVTQDSSLQDGEFIYKVKLRGTNFPSDGPVMQKKTMGWEASSERMYPEDGALKGEIKQRLKLKDGGHYDAEVKTTYKAKKPVQLPGAYNVNIKLDITSHNEDYTIVEQYERAEGRHSTGGMDELYK

SEQ ID NO: 160 - protein, 1547 aa, synthetic construct
  REGION 1..1547: note = SYNTHETIC
  VARIANT 1308: note = X can be any naturally occurring amino acid
  VARIANT 1310: note = X can be any naturally occurring amino acid
MTQFEGFTNLYQVSKTLRFELIPQGKTLKHIQEQGFIEEDKARNDHYKELKPIIDRIYKTYADQCLQLVQLDWENLSAAIDSYRKEKTEETRNALIEEQATYRNAIHDYFIGRTDNLTDAINKRHAEIYKGLFKAELFNGKVLKQLGTVTTTEHENALLRSFDKFTTYFSGFYENRKNVFSAEDISTAIPHRIVQDNFPKFKENCHIFTRLITAVPSLREHFENVKKAIGIFVSTSIEEVFSFPFYNQLLTQTQIDLYNQLLGGISREAGTEKIKGLNEVLNLAIQKNDETAHIIASLPHRFIPLFKQILSDRNTLSFILEEFKSDEEVIQSFCKYKTLLRNENVLETAEALFNELNSIDLTHIFISHKKLETISSALCDHWDTLRNALYERRISELTGKITKSAKEKVQRSLKHEDINLQEIISAAGKELSEAFKQKTSEILSHAHAALDQPLPTTLKKQEEKEILKSQLDSLLGLYHLLDWFAVDESNEVDPEFSARLTGIKLEMEPSLSFYNKARNYATKKPYSVEKFKLNFQMPTLASGWDVNKEKNNGAILFVKNGLYYLGIMPKQKGRYKALSFEPTEKTSEGFDKMYYDYFPDAAKMIPKCSTQLKAVTAHFQTHTTPILLSNNFIEPLEITKEIYDLNNPEKEPKKFQTAYAKKTGDQKGYREALCKWIDFTRDFLSKYTKTTSIDLSSLRPSSQYKDLGEYYAELNPLLYHISFQRIAEKEIMDAVETGKLYLFQIYNKDFAKGHHGKPNLHTLYWTGLFSPENLAKTSIKLNGQAELFYRPKSRMKRMAHRLGEKMLNKKLKDQKTPIPDTLYQELYDYVNHRLSHDLSDEARALLPNVITKEVSHEIIKDRRFTSDKFFFHVPITLNYQAANSPSKFNQRVNAYLKEHPETPIIGIDRGERNLIYITVIDSTGKILEQRSLNTIQQFDYQKKLDNREKERVAARQAWSVVGTIKDLKQGYLSQVIHEIVDLMIHYQAVVVLENLNFGFKSKRTGIAEKAVYQQFEKMLIDKLNCLVLKDYPAEKVGGVLNPYQLTDQFTSFAKMGTQSGFLFYVPAPYTSKIDPLTGFVDPFVWKTIKNHESRKHFLEGFDFLHYDVKTGDFILHFKMNRNLSFQRGLPGFMPAWDIVFEKNETQFDAKGTPFIAGKRIVPVIENHRFTGRYRDLYPANELIALLEEKGIVFRDGSNILPKLLENDDSHAIDTMVALIRSVLQMRNSNAATGEDYINSPVRDLNGVCFDSRFQNPEWPMDADANGAYHIALKGQLLLNHLKESKDLKLQNGISNQDWLAYIQELRNXPXPMVSKGEEDNMAIIKEFMRFKVHMEGSVNGHEFEIEGEGEGRPYEGTQTAKLKVTKGGPLPFAWDILSPQFMYGSKAYVKHPADIPDYLKLSFPEGFKWERVMNFEDGGVVTVTQDSSLQDGEFIYKVKLRGTNFPSDGPVMQKKTMGWEASSERMYPEDGALKGEIKQRLKLKDGGHYDAEVKTTYKAKKPVQLPGAYNVNIKLDITSHNEDYTIVEQYERAEGRHSTGGMDELYK

SEQ ID NO: 161 - protein, 1549 aa, synthetic construct
  REGION 1..1549: note = SYNTHETIC
  VARIANT 1308: note = X can be any naturally occurring amino acid
  VARIANT 1310: note = X can be any naturally occurring amino acid
  VARIANT 1312: note = X can be any naturally occurring amino acid
MTQFEGFTNLYQVSKTLRFELIPQGKTLKHIQEQGFIEEDKARNDHYKELKPIIDRIYKTYADQCLQLVQLDWENLSAAIDSYRKEKTEETRNALIEEQATYRNAIHDYFIGRTDNLTDAINKRHAEIYKGLFKAELFNGKVLKQLGTVTTTEHENALLRSFDKFTTYFSGFYENRKNVFSAEDISTAIPHRIVQDNFPKFKENCHIFTRLITAVPSLREHFENVKKAIGIFVSTSIEEVFSFPFYNQLLTQTQIDLYNQLLGGISREAGTEKIKGLNEVLNLAIQKNDETAHIIASLPHRFIPLFKQILSDRNTLSFILEEFKSDEEVIQSFCKYKTLLRNENVLETAEALFNELNSIDLTHIFISHKKLETISSALCDHWDTLRNALYERRISELTGKITKSAKEKVQRSLKHEDINLQEIISAAGKELSEAFKQKTSEILSHAHAALDQPLPTTLKKQEEKEILKSQLDSLLGLYHLLDWFAVDESNEVDPEFSARLTGIKLEMEPSLSFYNKARNYATKKPYSVEKFKLNFQMPTLASGWDVNKEKNNGAILFVKNGLYYLGIMPKQKGRYKALSFEPTEKTSEGFDKMYYDYFPDAAKMIPKCSTQLKAVTAHFQTHTTPILLSNNFIEPLEITKEIYDLNNPEKEPKKFQTAYAKKTGDQKGYREALCKWIDFTRDFLSKYTKTTSIDLSSLRPSSQYKDLGEYYAELNPLLYHISFQRIAEKEIMDAVETGKLYLFQIYNKDFAKGHHGKPNLHTLYWTGLFSPENLAKTSIKLNGQAELFYRPKSRMKRMAHRLGEKMLNKKLKDQKTPIPDTLYQELYDYVNHRLSHDLSDEARALLPNVITKEVSHEIIKDRRFTSDKFFFHVPITLNYQAANSPSKFNQRVNAYLKEHPETPIIGIDRGERNLIYITVIDSTGKILEQRSLNTIQQFDYQKKLDNREKERVAARQAWSVVGTIKDLKQGYLSQVIHEIVDLMIHYQAVVVLENLNFGFKSKRTGIAEKAVYQQFEKMLIDKLNCLVLKDYPAEKVGGVLNPYQLTDQFTSFAKMGTQSGFLFYVPAPYTSKIDPLTGFVDPFVWKTIKNHESRKHFLEGFDFLHYDVKTGDFILHFKMNRNLSFQRGLPGFMPAWDIVFEKNETQFDAKGTPFIAGKRIVPVIENHRFTGRYRDLYPANELIALLEEKGIVFRDGSNILPKLLENDDSHAIDTMVALIRSVLQMRNSNAATGEDYINSPVRDLNGVCFDSRFQNPEWPMDADANGAYHIALKGQLLLNHLKESKDLKLQNGISNQDWLAYIQELRNXPXPXPMVSKGEEDNMAIIKEFMRFKVHMEGSVNGHEFEIEGEGEGRPYEGTQTAKLKVTKGGPLPFAWDILSPQFMYGSKAYVKHPADIPDYLKLSFPEGFKWERVMNFEDGGVVTVTQDSSLQDGEFIYKVKLRGTNFPSDGPVMQKKTMGWEASSERMYPEDGALKGEIKQRLKLKDGGHYDAEVKTTYKAKKPVQLPGAYNVNIKLDITSHNEDYTIVEQYERAEGRHSTGGMDELYK

SEQ ID NO: 162 - protein, 1551 aa, synthetic construct
  REGION 1..1551: note = SYNTHETIC
  VARIANT 1308: note = X can be any naturally occurring amino acid
  VARIANT 1310: note = X can be any naturally occurring amino acid
  VARIANT 1312: note = X can be any naturally occurring amino acid
  VARIANT 1314: note = X can be any naturally occurring amino acid
MTQFEGFTNLYQVSKTLRFELIPQGKTLKHIQEQGFIEEDKARNDHYKELKPIIDRIYKTYADQCLQLVQLDWENLSAAIDSYRKEKTEETRNALIEEQATYRNAIHDYFIGRTDNLTDAINKRHAEIYKGLFKAELFNGKVLKQLGTVTTTEHENALLRSFDKFTTYFSGFYENRKNVFSAEDISTAIPHRIVQDNFPKFKENCHIFTRLITAVPSLREHFENVKKAIGIFVSTSIEEVFSFPFYNQLLTQTQIDLYNQLLGGISREAGTEKIKGLNEVLNLAIQKNDETAHIIASLPHRFIPLFKQILSDRNTLSFILEEFKSDEEVIQSFCKYKTLLRNENVLETAEALFNELNSIDLTHIFISHKKLETISSALCDHWDTLRNALYERRISELTGKITKSAKEKVQRSLKHEDINLQEIISAAGKELSEAFKQKTSEILSHAHAALDQPLPTTLKKQEEKEILKSQLDSLLGLYHLLDWFAVDESNEVDPEFSARLTGIKLEMEPSLSFYNKARNYATKKPYSVEKFKLNFQMPTLASGWDVNKEKNNGAILFVKNGLYYLGIMPKQKGRYKALSFEPTEKTSEGFDKMYYDYFPDAAKMIPKCSTQLKAVTAHFQTHTTPILLSNNFIEPLEITKEIYDLNNPEKEPKKFQTAYAKKTGDQKGYREALCKWIDFTRDFLSKYTKTTSIDLSSLRPSSQYKDLGEYYAELNPLLYHISFQRIAEKEIMDAVETGKLYLFQIYNKDFAKGHHGKPNLHTLYWTGLFSPENLAKTSIKLNGQAELFYRPKSRMKRMAHRLGEKMLNKKLKDQKTPIPDTLYQELYDYVNHRLSHDLSDEARALLPNVITKEVSHEIIKDRRFTSDKFFFHVPITLNYQAANSPSKFNQRVNAYLKEHPETPIIGIDRGERNLIYITVIDSTGKILEQRSLNTIQQFDYQKKLDNREKERVAARQAWSVVGTIKDLKQGYLSQVIHEIVDLMIHYQAVVVLENLNFGFKSKRTGIAEKAVYQQFEKMLIDKLNCLVLKDYPAEKVGGVLNPYQLTDQFTSFAKMGTQSGFLFYVPAPYTSKIDPLTGFVDPFVWKTIKNHESRKHFLEGFDFLHYDVKTGDFILHFKMNRNLSFQRGLPGFMPAWDIVFEKNETQFDAKGTPFIAGKRIVPVIENHRFTGRYRDLYPANELIALLEEKGIVFRDGSNILPKLLENDDSHAIDTMVALIRSVLQMRNSNAATGEDYINSPVRDLNGVCFDSRFQNPEWPMDADANGAYHIALKGQLLLNHLKESKDLKLQNGISNQDWLAYIQELRNXPXPXPXPMVSKGEEDNMAIIKEFMRFKVHMEGSVNGHEFEIEGEGEGRPYEGTQTAKLKVTKGGPLPFAWDILSPQFMYGSKAYVKHPADIPDYLKLSFPEGFKWERVMNFEDGGVVTVTQDSSLQDGEFIYKVKLRGTNFPSDGPVMQKKTMGWEASSERMYPEDGALKGEIKQRLKLKDGGHYDAEVKTTYKAKKPVQLPGAYNVNIKLDITSHNEDYTIVEQYERAEGRHSTGGMDELYK

SEQ ID NO: 163 - protein, 1553 aa, synthetic construct
  REGION 1..1553: note = SYNTHETIC
  VARIANT 1308: note = X can be any naturally occurring amino acid
  VARIANT 1310: note = X can be any naturally occurring amino acid
  VARIANT 1312: note = X can be any naturally occurring amino acid
  VARIANT 1314: note = X can be any naturally occurring amino acid
  VARIANT 1316: note = X can be any naturally occurring amino acid
MTQFEGFTNLYQVSKTLRFELIPQGKTLKHIQEQGFIEEDKARNDHYKELKPIIDRIYKTYADQCLQLVQLDWENLSAAIDSYRKEKTEETRNALIEEQATYRNAIHDYFIGRTDNLTDAINKRHAEIYKGLFKAELFNGKVLKQLGTVTTTEHENALLRSFDKFTTYFSGFYENRKNVFSAEDISTAIPHRIVQDNFPKFKENCHIFTRLITAVPSLREHFENVKKAIGIFVSTSIEEVFSFPFYNQLLTQTQIDLYNQLLGGISREAGTEKIKGLNEVLNLAIQKNDETAHIIASLPHRFIPLFKQILSDRNTLSFILEEFKSDEEVIQSFCKYKTLLRNENVLETAEALFNELNSIDLTHIFISHKKLETISSALCDHWDTLRNALYERRISELTGKITKSAKEKVQRSLKHEDINLQEIISAAGKELSEAFKQKTSEILSHAHAALDQPLPTTLKKQEEKEILKSQLDSLLGLYHLLDWFAVDESNEVDPEFSARLTGIKLEMEPSLSFYNKARNYATKKPYSVEKFKLNFQMPTLASGWDVNKEKNNGAILFVKNGLYYLGIMPKQKGRYKALSFEPTEKTSEGFDKMYYDYFPDAAKMIPKCSTQLKAVTAHFQTHTTPILLSNNFIEPLEITKEIYDLNNPEKEPKKFQTAYAKKTGDQKGYREALCKWIDFTRDFLSKYTKTTSIDLSSLRPSSQYKDLGEYYAELNPLLYHISFQRIAEKEIMDAVETGKLYLFQIYNKDFAKGHHGKPNLHTLYWTGLFSPENLAKTSIKLNGQAELFYRPKSRMKRMAHRLGEKMLNKKLKDQKTPIPDTLYQELYDYVNHRLSHDLSDEARALLPNVITKEVSHEIIKDRRFTSDKFFFHVPITLNYQAANSPSKFNQRVNAYLKEHPETPIIGIDRGERNLIYITVIDSTGKILEQRSLNTIQQFDYQKKLDNREKERVAARQAWSVVGTIKDLKQGYLSQVIHEIVDLMIHYQAVVVLENLNFGFKSKRTGIAEKAVYQQFEKMLIDKLNCLVLKDYPAEKVGGVLNPYQLTDQFTSFAKMGTQSGFLFYVPAPYTSKIDPLTGFVDPFVWKTIKNHESRKHFLEGFDFLHYDVKTGDFILHFKMNRNLSFQRGLPGFMPAWDIVFEKNETQFDAKGTPFIAGKRIVPVIENHRFTGRYRDLYPANELIALLEEKGIVFRDGSNILPKLLENDDSHAIDTMVALIRSVLQMRNSNAATGEDYINSPVRDLNGVCFDSRFQNPEWPMDADANGAYHIALKGQLLLNHLKESKDLKLQNGISNQDWLAYIQELRNXPXPXPXPXPMVSKGEEDNMAIIKEFMRFKVHMEGSVNGHEFEIEGEGEGRPYEGTQTAKLKVTKGGPLPFAWDILSPQFMYGSKAYVKHPADIPDYLKLSFPEGFKWERVMNFEDGGVVTVTQDSSLQDGEFIYKVKLRGTNFPSDGPVMQKKTMGWEASSERMYPEDGALKGEIKQRLKLKDGGHYDAEVKTTYKAKKPVQLPGAYNVNIKLDITSHNEDYTIVEQYERAEGRHSTGGMDELYK

SEQ ID NO: 164 - protein, 1555 aa, synthetic construct
  REGION 1..1555: note = SYNTHETIC
  VARIANT 1308: note = X can be any naturally occurring amino acid
  VARIANT 1310: note = X can be any naturally occurring amino acid
  VARIANT 1312: note = X can be any naturally occurring amino acid
  VARIANT 1314: note = X can be any naturally occurring amino acid
  VARIANT 1316: note = X can be any naturally occurring amino acid
  VARIANT 1318: note = X can be any naturally occurring amino acid
MTQFEGFTNLYQVSKTLRFELIPQGKTLKHIQEQGFIEEDKARNDHYKELKPIIDRIYKTYADQCLQLVQLDWENLSAAIDSYRKEKTEETRNALIEEQATYRNAIHDYFIGRTDNLTDAINKRHAEIYKGLFKAELFNGKVLKQLGTVTTTEHENALLRSFDKFTTYFSGFYENRKNVFSAEDISTAIPHRIVQDNFPKFKENCHIFTRLITAVPSLREHFENVKKAIGIFVSTSIEEVFSFPFYNQLLTQTQIDLYNQLLGGISREAGTEKIKGLNEVLNLAIQKNDETAHIIASLPHRFIPLFKQILSDRNTLSFILEEFKSDEEVIQSFCKYKTLLRNENVLETAEALFNELNSIDLTHIFISHKKLETISSALCDHWDTLRNALYERRISELTGKITKSAKEKVQRSLKHEDINLQEIISAAGKELSEAFKQKTSEILSHAHAALDQPLPTTLKKQEEKEILKSQLDSLLGLYHLLDWFAVDESNEVDPEFSARLTGIKLEMEPSLSFYNKARNYATKKPYSVEKFKLNFQMPTLASGWDVNKEKNNGAILFVKNGLYYLGIMPKQKGRYKALSFEPTEKTSEGFDKMYYDYFPDAAKMIPKCSTQLKAVTAHFQTHTTPILLSNNFIEPLEITKEIYDLNNPEKEPKKFQTAYAKKTGDQKGYREALCKWIDFTRDFLSKYTKTTSIDLSSLRPSSQYKDLGEYYAELNPLLYHISFQRIAEKEIMDAVETGKLYLFQIYNKDFAKGHHGKPNLHTLYWTGLFSPENLAKTSIKLNGQAELFYRPKSRMKRMAHRLGEKMLNKKLKDQKTPIPDTLYQELYDYVNHRLSHDLSDEARALLPNVITKEVSHEIIKDRRFTSDKFFFHVPITLNYQAANSPSKFNQRVNAYLKEHPETPIIGIDRGERNLIYITVIDSTGKILEQRSLNTIQQFDYQKKLDNREKERVAARQAWSVVGTIKDLKQGYLSQVIHEIVDLMIHYQAVVVLENLNFGFKSKRTGIAEKAVYQQFEKMLIDKLNCLVLKDYPAEKVGGVLNPYQLTDQFTSFAKMGTQSGFLFYVPAPYTSKIDPLTGFVDPFVWKTIKNHESRKHFLEGFDFLHYDVKTGDFILHFKMNRNLSFQRGLPGFMPAWDIVFEKNETQFDAKGTPFIAGKRIVPVIENHRFTGRYRDLYPANELIALLEEKGIVFRDGSNILPKLLENDDSHAIDTMVALIRSVLQMRNSNAATGEDYINSPVRDLNGVCFDSRFQNPEWPMDADANGAYHIALKGQLLLNHLKESKDLKLQNGISNQDWLAYIQELRNXPXPXPXPXPXPMVSKGEEDNMAIIKEFMRFKVHMEGSVNGHEFEIEGEGEGRPYEGTQTAKLKVTKGGPLPFAWDILSPQFMYGSKAYVKHPADIPDYLKLSFPEGFKWERVMNFEDGGVVTVTQDSSLQDGEFIYKVKLRGTNFPSDGPVMQKKTMGWEASSERMYPEDGALKGEIKQRLKLKDGGHYDAEVKTTYKAKKPVQLPGAYNVNIKLDITSHNEDYTIVEQYERAEGRHSTGGMDELYK

SEQ ID NO: 165 - protein, 1557 aa, synthetic construct
  REGION 1..1557: note = SYNTHETIC
  VARIANT 1308: note = X can be any naturally occurring amino acid
  VARIANT 1310: note = X can be any naturally occurring amino acid
  VARIANT 1312: note = X can be any naturally occurring amino acid
  VARIANT 1314: note = X can be any naturally occurring amino acid
  VARIANT 1316: note = X can be any naturally occurring amino acid
  VARIANT 1318: note = X can be any naturally occurring amino acid
  VARIANT 1320: note = X can be any naturally occurring amino acid
MTQFEGFTNLYQVSKTLRFELIPQGKTLKHIQEQGFIEEDKARNDHYKELKPIIDRIYKTYADQCLQLVQLDWENLSAAIDSYRKEKTEETRNALIEEQATYRNAIHDYFIGRTDNLTDAINKRHAEIYKGLFKAELFNGKVLKQLGTVTTTEHENALLRSFDKFTTYFSGFYENRKNVFSAEDISTAIPHRIVQDNFPKFKENCHIFTRLITAVPSLREHFENVKKAIGIFVSTSIEEVFSFPFYNQLLTQTQIDLYNQLLGGISREAGTEKIKGLNEVLNLAIQKNDETAHIIASLPHRFIPLFKQILSDRNTLSFILEEFKSDEEVIQSFCKYKTLLRNENVLETAEALFNELNSIDLTHIFISHKKLETISSALCDHWDTLRNALYERRISELTGKITKSAKEKVQRSLKHEDINLQEIISAAGKELSEAFKQKTSEILSHAHAALDQPLPTTLKKQEEKEILKSQLDSLLGLYHLLDWFAVDESNEVDPEFSARLTGIKLEMEPSLSFYNKARNYATKKPYSVEKFKLNFQMPTLASGWDVNKEKNNGAILFVKNGLYYLGIMPKQKGRYKALSFEPTEKTSEGFDKMYYDYFPDAAKMIPKCSTQLKAVTAHFQTHTTPILLSNNFIEPLEITKEIYDLNNPEKEPKKFQTAYAKKTGDQKGYREALCKWIDFTRDFLSKYTKTTSIDLSSLRPSSQYKDLGEYYAELNPLLYHISFQRIAEKEIMDAVETGKLYLFQIYNKDFAKGHHGKPNLHTLYWTGLFSPENLAKTSIKLNGQAELFYRPKSRMKRMAHRLGEKMLNKKLKDQKTPIPDTLYQELYDYVNHRLSHDLSDEARALLPNVITKEVSHEIIKDRRFTSDKFFFHVPITLNYQAANSPSKFNQRVNAYLKEHPETPIIGIDRGERNLIYITVIDSTGKILEQRSLNTIQQFDYQKKLDNREKERVAARQAWSVVGTIKDLKQGYLSQVIHEIVDLMIHYQAVVVLENLNFGFKSKRTGIAEKAVYQQFEKMLIDKLNCLVLKDYPAEKVGGVLNPYQLTDQFTSFAKMGTQSGFLFYVPAPYTSKIDPLTGFVDPFVWKTIKNHESRKHFLEGFDFLHYDVKTGDFILHFKMNRNLSFQRGLPGFMPAWDIVFEKNETQFDAKGTPFIAGKRIVPVIENHRFTGRYRDLYPANELIALLEEKGIVFRDGSNILPKLLENDDSHAIDTMVALIRSVLQMRNSNAATGEDYINSPVRDLNGVCFDSRFQNPEWPMDADANGAYHIALKGQLLLNHLKESKDLKLQNGISNQDWLAYIQELRNXPXPXPXPXPXPXPMVSKGEEDNMAIIKEFMRFKVHMEGSVNGHEFEIEGEGEGRPYEGTQTAKLKVTKGGPLPFAWDILSPQFMYGSKAYVKHPADIPDYLKLSFPEGFKWERVMNFEDGGVVTVTQDSSLQDGEFIYKVKLRGTNFPSDGPVMQKKTMGWEASSERMYPEDGALKGEIKQRLKLKDGGHYDAEVKTTYKAKKPVQLPGAYNVNIKLDITSHNEDYTIVEQYERAEGRHSTGGMDELYK

SEQ ID NO: 166 - protein, 1559 aa, synthetic construct
  REGION 1..1559: note = SYNTHETIC
  VARIANT 1308: note = X can be any naturally occurring amino acid
  VARIANT 1310: note = X can be any naturally occurring amino acid
  VARIANT 1312: note = X can be any naturally occurring amino acid
  VARIANT 1314: note = X can be any naturally occurring amino acid
  VARIANT 1316: note = X can be any naturally occurring amino acid
  VARIANT 1318: note = X can be any naturally occurring amino acid
  VARIANT 1320: note = X can be any naturally occurring amino acid
  VARIANT 1322: note = X can be any naturally occurring amino acid
MTQFEGFTNLYQVSKTLRFELIPQGKTLKHIQEQGFIEEDKARNDHYKELKPIIDRIYKTYADQCLQLVQLDWENLSAAIDSYRKEKTEETRNALIEEQATYRNAIHDYFIGRTDNLTDAINKRHAEIYKGLFKAELFNGKVLKQLGTVTTTEHENALLRSFDKFTTYFSGFYENRKNVFSAEDISTAIPHRIVQDNFPKFKENCHIFTRLITAVPSLREHFENVKKAIGIFVSTSIEEVFSFPFYNQLLTQTQIDLYNQLLGGISREAGTEKIKGLNEVLNLAIQKNDETAHIIASLPHRFIPLFKQILSDRNTLSFILEEFKSDEEVIQSFCKYKTLLRNENVLETAEALFNELNSIDLTHIFISHKKLETISSALCDHWDTLRNALYERRISELTGKITKSAKEKVQRSLKHEDINLQEIISAAGKELSEAFKQKTSEILSHAHAALDQPLPTTLKKQEEKEILKSQLDSLLGLYHLLDWFAVDESNEVDPEFSARLTGIKLEMEPSLSFYNKARNYATKKPYSVEKFKLNFQMPTLASGWDVNKEKNNGAILFVKNGLYYLGIMPKQKGRYKALSFEPTEKTSEGFDKMYYDYFPDAAKMIPKCSTQLKAVTAHFQTHTTPILLSNNFIEPLEITKEIYDLNNPEKEPKKFQTAYAKKTGDQKGYREALCKWIDFTRDFLSKYTKTTSIDLSSLRPSSQYKDLGEYYAELNPLLYHISFQRIAEKEIMDAVETGKLYLFQIYNKDFAKGHHGKPNLHTLYWTGLFSPENLAKTSIKLNGQAELFYRPKSRMKRMAHRLGEKMLNKKLKDQKTPIPDTLYQELYDYVNHRLSHDLSDEARALLPNVITKEVSHEIIKDRRFTSDKFFFHVPITLNYQAANSPSKFNQRVNAYLKEHPETPIIGIDRGERNLIYITVIDSTGKILEQRSLNTIQQFDYQKKLDNREKERVAARQAWSVVGTIKDLKQGYLSQVIHEIVDLMIHYQAVVVLENLNFGFKSKRTGIAEKAVYQQFEKMLIDKLNCLVLKDYPAEKVGGVLNPYQLTDQFTSFAKMGTQSGFLFYVPAPYTSKIDPLTGFVDPFVWKTIKNHESRKHFLEGFDFLHYDVKTGDFILHFKMNRNLSFQRGLPGFMPAWDIVFEKNETQFDAKGTPFIAGKRIVPVIENHRFTGRYRDLYPANELIALLEEKGIVFRDGSNILPKLLENDDSHAIDTMVALIRSVLQMRNSNAATGEDYINSPVRDLNGVCFDSRFQNPEWPMDADANGAYHIALKGQLLLNHLKESKDLKLQNGISNQDWLAYIQELRNXPXPXPXPXPXPXPXPMVSKGEEDNMAIIKEFMRFKVHMEGSVNGHEFEIEGEGEGRPYEGTQTAKLKVTKGGPLPFAWDILSPQFMYGSKAYVKHPADIPDYLKLSFPEGFKWERVMNFEDGGVVTVTQDSSLQDGEFIYKVKLRGTNFPSDGPVMQKKTMGWEASSERMYPEDGALKGEIKQRLKLKDGGHYDAEVKTTYKAKKPVQLPGAYNVNIKLDITSHNEDYTIVEQYERAEGRHSTGGMDELYK

SEQ ID NO: 167 - protein, 1561 aa, synthetic construct
  REGION 1..1561: note = SYNTHETIC
  VARIANT 1308: note = X can be any naturally occurring amino acid
  VARIANT 1310: note = X can be any naturally occurring amino acid
  VARIANT 1312: note = X can be any naturally occurring amino acid
  VARIANT 1314: note = X can be any naturally occurring amino acid
  VARIANT 1316: note = X can be any naturally occurring amino acid
  VARIANT 1318: note = X can be any naturally occurring amino acid
  VARIANT 1320: note = X can be any naturally occurring amino acid
  VARIANT 1322: note = X can be any naturally occurring amino acid
  VARIANT 1324: note = X can be any naturally occurring amino acid
MTQFEGFTNLYQVSKTLRFELIPQGKTLKHIQEQGFIEEDKARNDHYKELKPIIDRIYKTYADQCLQLVQLDWENLSAAIDSYRKEKTEETRNALIEEQATYRNAIHDYFIGRTDNLTDAINKRHAEIYKGLFKAELFNGKVLKQLGTVTTTEHENALLRSFDKFTTYFSGFYENRKNVFSAEDISTAIPHRIVQDNFPKFKENCHIFTRLITAVPSLREHFENVKKAIGIFVSTSIEEVFSFPFYNQLLTQTQIDLYNQLLGGISREAGTEKIKGLNEVLNLAIQKNDETAHIIASLPHRFIPLFKQILSDRNTLSFILEEFKSDEEVIQSFCKYKTLLRNENVLETAEALFNELNSIDLTHIFISHKKLETISSALCDHWDTLRNALYERRISELTGKITKSAKEKVQRSLKHEDINLQEIISAAGKELSEAFKQKTSEILSHAHAALDQPLPTTLKKQEEKEILKSQLDSLLGLYHLLDWFAVDESNEVDPEFSARLTGIKLEMEPSLSFYNKARNYATKKPYSVEKFKLNFQMPTLASGWDVNKEKNNGAILFVKNGLYYLGIMPKQKGRYKALSFEPTEKTSEGFDKMYYDYFPDAAKMIPKCSTQLKAVTAHFQTHTTPILLSNNFIEPLEITKEIYDLNNPEKEPKKFQTAYAKKTGDQKGYREALCKWIDFTRDFLSKYTKTTSIDLSSLRPSSQYKDLGEYYAELNPLLYHISFQRIAEKEIMDAVETGKLYLFQIYNKDFAKGHHGKPNLHTLYWTGLFSPENLAKTSIKLNGQAELFYRPKSRMKRMAHRLGEKMLNKKLKDQKTPIPDTLYQELYDYVNHRLSHDLSDEARALLPNVITKEVSHEIIKDRRFTSDKFFFHVPITLNYQAANSPSKFNQRVNAYLKEHPETPIIGIDRGERNLIYITVIDSTGKILEQRSLNTIQQFDYQKKLDNREKERVAARQAWSVVGTIKDLKQGYLSQVIHEIVDLMIHYQAVVVLENLNFGFKSKRTGIAEKAVYQQFEKMLIDKLNCLVLKDYPAEKVGGVLNPYQLTDQFTSFAKMGTQSGFLFYVPAPYTSKIDPLTGFVDPFVWKTIKNHESRKHFLEGFDFLHYDVKTGDFILHFKMNRNLSFQRGLPGFMPAWDIVFEKNETQFDAKGTPFIAGKRIVPVIENHRFTGRYRDLYPANELIALLEEKGIVFRDGSNILPKLLENDDSHAIDTMVALIRSVLQMRNSNAATGEDYINSPVRDLNGVCFDSRFQNPEWPMDADANGAYHIALKGQLLLNHLKESKDLKLQNGISNQDWLAYIQELRNXPXPXPXPXPXPXPXPXPMVSKGEEDNMAIIKEFMRFKVHMEGSVNGHEFEIEGEGEGRPYEGTQTAKLKVTKGGPLPFAWDILSPQFMYGSKAYVKHPADIPDYLKLSFPEGFKWERVMNFEDGGVVTVTQDSSLQDGEFIYKVKLRGTNFPSDGPVMQKKTMGWEASSERMYPEDGALKGEIKQRLKLKDGGHYDAEVKTTYKAKKPVQLPGAYNVNIKLDITSHNEDYTIVEQYERAEGRHSTGGMDELYK

SEQ ID NO: 168 - protein, 1563 aa, synthetic construct
  REGION 1..1563: note = SYNTHETIC
  VARIANT 1308: note = X can be any naturally occurring amino acid
  VARIANT 1310: note = X can be any naturally occurring amino acid
  VARIANT 1312: note = X can be any naturally occurring amino acid
  VARIANT 1314: note = X can be any naturally occurring amino acid
  VARIANT 1316: note = X can be any naturally occurring amino acid
  VARIANT 1318: note = X can be any naturally occurring amino acid
  VARIANT 1320: note = X can be any naturally occurring amino acid
  VARIANT 1322: note = X can be any naturally occurring amino acid
  VARIANT 1324: note = X can be any naturally occurring amino acid
  VARIANT 1326: note = X can be any naturally occurring amino acid
MTQFEGFTNLYQVSKTLRFELIPQGKTLKHIQEQGFIEEDKARNDHYKELKPIIDRIYKTYADQCLQLVQLDWENLSAAIDSYRKEKTEETRNALIEEQATYRNAIHDYFIGRTDNLTDAINKRHAEIYKGLFKAELFNGKVLKQLGTVTTTEHENALLRSFDKFTTYFSGFYENRKNVFSAEDISTAIPHRIVQDNFPKFKENCHIFTRLITAVPSLREHFENVKKAIGIFVSTSIEEVFSFPFYNQLLTQTQIDLYNQLLGGISREAGTEKIKGLNEVLNLAIQKNDETAHIIASLPHRFIPLFKQILSDRNTLSFILEEFKSDEEVIQSFCKYKTLLRNENVLETAEALFNELNSIDLTHIFISHKKLETISSALCDHWDTLRNALYERRISELTGKITKSAKEKVQRSLKHEDINLQEIISAAGKELSEAFKQKTSEILSHAHAALDQPLPTTLKKQEEKEILKSQLDSLLGLYHLLDWFAVDESNEVDPEFSARLTGIKLEMEPSLSFYNKARNYATKKPYSVEKFKLNFQMPTLASGWDVNKEKNNGAILFVKNGLYYLGIMPKQKGRYKALSFEPTEKTSEGFDKMYYDYFPDAAKMIPKCSTQLKAVTAHFQTHTTPILLSNNFIEPLEITKEIYDLNNPEKEPKKFQTAYAKKTGDQKGYREALCKWIDFTRDFLSKYTKTTSIDLSSLRPSSQYKDLGEYYAELNPLLYHISFQRIAEKEIMDAVETGKLYLFQIYNKDFAKGHHGKPNLHTLYWTGLFSPENLAKTSIKLNGQAELFYRPKSRMKRMAHRLGEKMLNKKLKDQKTPIPDTLYQELYDYVNHRLSHDLSDEARALLPNVITKEVSHEIIKDRRFTSDKFFFHVPITLNYQAANSPSKFNQRVNAYLKEHPETPIIGIDRGERNLIYITVIDSTGKILEQRSLNTIQQFDYQKKLDNREKERVAARQAWSVVGTIKDLKQGYLSQVIHEIVDLMIHYQAVVVLENLNFGFKSKRTGIAEKAVYQQFEKMLIDKLNCLVLKDYPAEKVGGVLNPYQLTDQFTSFAKMGTQSGFLFYVPAPYTSKIDPLTGFVDPFVWKTIKNHESRKHFLEGFDFLHYDVKTGDFILHFKMNRNLSFQRGLPGFMPAWDIVFEKNETQFDAKGTPFIAGKRIVPVIENHRFTGRYRDLYPANELIALLEEKGIVFRDGSNILPKLLENDDSHAIDTMVALIRSVLQMRNSNAATGEDYINSPVRDLNGVCFDSRFQNPEWPMDADANGAYHIALKGQLLLNHLKESKDLKLQNGISNQDWLAYIQELRNXPXPXPXPXPXPXPXPXPXPMVSKGEEDNMAIIKEFMRFKVHMEGSVNGHEFEIEGEGEGRPYEGTQTAKLKVTKGGPLPFAWDILSPQFMYGSKAYVKHPADIPDYLKLSFPEGFKWERVMNFEDGGVVTVTQDSSLQDGEFIYKVKLRGTNFPSDGPVMQKKTMGWEASSERMYPEDGALKGEIKQRLKLKDGGHYDAEVKTTYKAKKPVQLPGAYNVNIKLDITSHNEDYTIVEQYERAEGRHSTGGMDELYK

SEQ ID NO: 169 - protein, 1565 aa, synthetic construct
  REGION 1..1565: note = SYNTHETIC
  VARIANT 1308: note = X can be any naturally occurring amino acid
  VARIANT 1310: note = X can be any naturally occurring amino acid
  VARIANT 1312: note = X can be any naturally occurring amino acid
  VARIANT 1314: note = X can be any naturally occurring amino acid
  VARIANT 1316: note = X can be any naturally occurring amino acid
  VARIANT 1318: note = X can be any naturally occurring amino acid
  VARIANT 1320: note = X can be any naturally occurring amino acid
  VARIANT 1322: note = X can be any naturally occurring amino acid
  VARIANT 1324: note = X can be any naturally occurring amino acid
  VARIANT 1326: note = X can be any naturally occurring amino acid
  VARIANT 1328: note = X can be any naturally occurring amino acid
MTQFEGFTNLYQVSKTLRFELIPQGKTLKHIQEQGFIEEDKARNDHYKELKPIIDRIYKTYADQCLQLVQLDWENLSAAIDSYRKEKTEETRNALIEEQATYRNAIHDYFIGRTDNLTDAINKRHAEIYKGLFKAELFNGKVLKQLGTVTTTEHENALLRSFDKFTTYFSGFYENRKNVFSAEDISTAIPHRIVQDNFPKFKENCHIFTRLITAVPSLREHFENVKKAIGIFVSTSIEEVFSFPFYNQLLTQTQIDLYNQLLGGISREAGTEKIKGLNEVLNLAIQKNDETAHIIASLPHRFIPLFKQILSDRNTLSFILEEFKSDEEVIQSFCKYKTLLRNENVLETAEALFNELNSIDLTHIFISHKKLETISSALCDHWDTLRNALYERRISELTGKITKSAKEKVQRSLKHEDINLQEIISAAGKELSEAFKQKTSEILSHAHAALDQPLPTTLKKQEEKEILKSQLDSLLGLYHLLDWFAVDESNEVDPEFSARLTGIKLEMEPSLSFYNKARNYATKKPYSVEKFKLNFQMPTLASGWDVNKEKNNGAILFVKNGLYYLGIMPKQKGRYKALSFEPTEKTSEGFDKMYYDYFPDAAKMIPKCSTQLKAVTAHFQTHTTPILLSNNFIEPLEITKEIYDLNNPEKEPKKFQTAYAKKTGDQKGYREALCKWIDFTRDFLSKYTKTTSIDLSSLRPSSQYKDLGEYYAELNPLLYHISFQRIAEKEIMDAVETGKLYLFQIYNKDFAKGHHGKPNLHTLYWTGLFSPENLAKTSIKLNGQAELFYRPKSRMKRMAHRLGEKMLNKKLKDQKTPIPDTLYQELYDYVNHRLSHDLSDEARALLPNVITKEVSHEIIKDRRFTSDKFFFHVPITLNYQAANSPSKFNQRVNAYLKEHPETPIIGIDRGERNLIYITVIDSTGKILEQRSLNTIQQFDYQKKLDNREKERVAARQAWSVVGTIKDLKQGYLSQVIHEIVDLMIHYQAVVVLENLNFGFKSKRTGIAEKAVYQQFEKMLIDKLNCLVLKDYPAEKVGGVLNPYQLTDQFTSFAKMGTQSGFLFYVPAPYTSKIDPLTGFVDPFVWKTIKNHESRKHFLEGFDFLHYDVKTGDFILHFKMNRNLSFQRGLPGFMPAWDIVFEKNETQFDAKGTPFIAGKRIVPVIENHRFTGRYRDLYPANELIALLEEKGIVFRDGSNILPKLLENDDSHAIDTMVALIRSVLQMRNSNAATGEDYINSPVRDLNGVCFDSRFQNPEWPMDADANGAYHIALKGQLLLNHLKESKDLKLQNGISNQDWLAYIQELRNXPXPXPXPXPXPXPXPXPXPXPMVSKGEEDNMAIIKEFMRFKVHMEGSVNGHEFEIEGEGEGRPYEGTQTAKLKVTKGGPLPFAWDILSPQFMYGSKAYVKHPADIPDYLKLSFPEGFKWERVMNFEDGGVVTVTQDSSLQDGEFIYKVKLRGTNFPSDGPVMQKKTMGWEASSERMYPEDGALKGEIKQRLKLKDGGHYDAEVKTTYKAKKPVQLPGAYNVNIKLDITSHNEDYTIVEQYERAEGRHSTGGMDELYK

SEQ ID NO: 170 - protein, 1567 aa, synthetic construct
  REGION 1..1567: note = SYNTHETIC
  VARIANT 1308: note = X can be any naturally occurring amino acid
  VARIANT 1310: note = X can be any naturally occurring amino acid
  VARIANT 1312: note = X can be any naturally occurring amino acid
  VARIANT 1314: note = X can be any naturally occurring amino acid
  VARIANT 1316: note = X can be any naturally occurring amino acid
  VARIANT 1318: note = X can be any naturally occurring amino acid
  VARIANT 1320: note = X can be any naturally occurring amino acid
  VARIANT 1322: note = X can be any naturally occurring amino acid
  VARIANT 1324: note = X can be any naturally occurring amino acid
  VARIANT 1326: note = X can be any naturally occurring amino acid
  VARIANT 1328: note = X can be any naturally occurring amino acid
  VARIANT 1330: note = X can be any naturally occurring amino acid
MTQFEGFTNLYQVSKTLRFELIPQGKTLKHIQEQGFIEEDKARNDHYKELKPIIDRIYKTYADQCLQLVQLDWENLSAAIDSYRKEKTEETRNALIEEQATYRNAIHDYFIGRTDNLTDAINKRHAEIYKGLFKAELFNGKVLKQLGTVTTTEHENALLRSFDKFTTYFSGFYENRKNVFSAEDISTAIPHRIVQDNFPKFKENCHIFTRLITAVPSLREHFENVKKAIGIFVSTSIEEVFSFPFYNQLLTQTQIDLYNQLLGGISREAGTEKIKGLNEVLNLAIQKNDETAHIIASLPHRFIPLFKQILSDRNTLSFILEEFKSDEEVIQSFCKYKTLLRNENVLETAEALFNELNSIDLTHIFISHKKLETISSALCDHWDTLRNALYERRISELTGKITKSAKEKVQRSLKHEDINLQEIISAAGKELSEAFKQKTSEILSHAHAALDQPLPTTLKKQEEKEILKSQLDSLLGLYHLLDWFAVDESNEVDPEFSARLTGIKLEMEPSLSFYNKARNYATKKPYSVEKFKLNFQMPTLASGWDVNKEKNNGAILFVKNGLYYLGIMPKQKGRYKALSFEPTEKTSEGFDKMYYDYFPDAAKMIPKCSTQLKAVTAHFQTHTTPILLSNNFIEPLEITKEIYDLNNPEKEPKKFQTAYAKKTGDQKGYREALCKWIDFTRDFLSKYTKTTSIDLSSLRPSSQYKDLGEYYAELNPLLYHISFQRIAEKEIMDAVETGKLYLFQIYNKDFAKGHHGKPNLHTLYWTGLFSPENLAKTSIKLNGQAELFYRPKSRMKRMAHRLGEKMLNKKLKDQKTPIPDTLYQELYDYVNHRLSHDLSDEARALLPNVITKEVSHEIIKDRRFTSDKFFFHVPITLNYQAANSPSKFNQRVNAYLKEHPETPIIGIDRGERNLIYITVIDSTGKILEQRSLNTIQQFDYQKKLDNREKERVAARQAWSVVGTIKDLKQGYLSQVIHEIVDLMIHYQAVVVLENLNFGFKSKRTGIAEKAVYQQFEKMLIDKLNCLVLKDYPAEKVGGVLNPYQLTDQFTSFAKMGTQSGFLFYVPAPYTSKIDPLTGFVDPFVWKTIKNHESRKHFLEGFDFLHYDVKTGDFILHFKMNRNLSFQRGLPGFMPAWDIVFEKNETQFDAKGTPFIAGKRIVPVIENHRFTGRYRDLYPANELIALLEEKGIVFRDGSNILPKLLENDDSHAIDTMVALIRSVLQMRNSNAATGEDYINSPVRDLNGVCFDSRFQNPEWPMDADANGAYHIALKGQLLLNHLKESKDLKLQNGISNQDWLAYIQELRNXPXPXPXPXPXPXPXPXPXPXPXPMVSKGEEDNMAIIKEFMRFKVHMEGSVNGHEFEIEGEGEGRPYEGTQTAKLKVTKGGPLPFAWDILSPQFMYGSKAYVKHPADIPDYLKLSFPEGFKWERVMNFEDGGVVTVTQDSSLQDGEFIYKVKLRGTNFPSDGPVMQKKTMGWEASSERMYPEDGALKGEIKQRLKLKDGGHYDAEVKTTYKAKKPVQLPGAYNVNIKLDITSHNEDYTIVEQYERAEGRHSTGGMDELYK

SEQ ID NO: 171 - protein, 1569 aa, synthetic construct
  REGION 1..1569: note = SYNTHETIC
  VARIANT 1308: note = X can be any naturally occurring amino acid
  VARIANT 1310: note = X can be any naturally occurring amino acid
  VARIANT 1312: note = X can be any naturally occurring amino acid
  VARIANT 1314: note = X can be any naturally occurring amino acid
  VARIANT 1316: note = X can be any naturally occurring amino acid
  VARIANT 1318: note = X can be any naturally occurring amino acid
  VARIANT 1320: note = X can be any naturally occurring amino acid
  VARIANT 1322: note = X can be any naturally occurring amino acid
  VARIANT 1324: note = X can be any naturally occurring amino acid
  VARIANT 1326: note = X can be any naturally occurring amino acid
  VARIANT 1328: note = X can be any naturally occurring amino acid
  VARIANT 1330: note = X can be any naturally occurring amino acid
  VARIANT 1332: note = X can be any naturally occurring amino acid
MTQFEGFTNLYQVSKTLRFELIPQGKTLKHIQEQGFIEEDKARNDHYKELKPIIDRIYKTYADQCLQLVQLDWENLSAAIDSYRKEKTEETRNALIEEQATYRNAIHDYFIGRTDNLTDAINKRHAEIYKGLFKAELFNGKVLKQLGTVTTTEHENALLRSFDKFTTYFSGFYENRKNVFSAEDISTAIPHRIVQDNFPKFKENCHIFTRLITAVPSLREHFENVKKAIGIFVSTSIEEVFSFPFYNQLLTQTQIDLYNQLLGGISREAGTEKIKGLNEVLNLAIQKNDETAHIIASLPHRFIPLFKQILSDRNTLSFILEEFKSDEEVIQSFCKYKTLLRNENVLETAEALFNELNSIDLTHIFISHKKLETISSALCDHWDTLRNALYERRISELTGKITKSAKEKVQRSLKHEDINLQEIISAAGKELSEAFKQKTSEILSHAHAALDQPLPTTLKKQEEKEILKSQLDSLLGLYHLLDWFAVDESNEVDPEFSARLTGIKLEMEPSLSFYNKARNYATKKPYSVEKFKLNFQMPTLASGWDVNKEKNNGAILFVKNGLYYLGIMPKQKGRYKALSFEPTEKTSEGFDKMYYDYFPDAAKMIPKCSTQLKAVTAHFQTHTTPILLSNNFIEPLEITKEIYDLNNPEKEPKKFQTAYAKKTGDQKGYREALCKWIDFTRDFLSKYTKTTSIDLSSLRPSSQYKDLGEYYAELNPLLYHISFQRIAEKEIMDAVETGKLYLFQIYNKDFAKGHHGKPNLHTLYWTGLFSPENLAKTSIKLNGQAELFYRPKSRMKRMAHRLGEKMLNKKLKDQKTPIPDTLYQELYDYVNHRLSHDLSDEARALLPNVITKEVSHEIIKDRRFTSDKFFFHVPITLNYQAANSPSKFNQRVNAYLKEHPETPIIGIDRGERNLIYITVIDSTGKILEQRSLNTIQQFDYQKKLDNREKERVAARQAWSVVGTIKDLKQGYLSQVIHEIVDLMIHYQAVVVLENLNFGFKSKRTGIAEKAVYQQFEKMLIDKLNCLVLKDYPAEKVGGVLNPYQLTDQFTSFAKMGTQSGFLFYVPAPYTSKIDPLTGFVDPFVWKTIKNHESRKHFLEGFDFLHYDVKTGDFILHFKMNRNLSFQRGLPGFMPAWDIVFEKNETQFDAKGTPFIAGKRIVPVIENHRFTGRYRDLYPANELIALLEEKGIVFRDGSNILPKLLENDDSHAIDTMVALIRSVLQMRNSNAATGEDYINSPVRDLNGVCFDSRFQNPEWPMDADANGAYHIALKGQLLLNHLKESKDLKLQNGISNQDWLAYIQELRNXPXPXPXPXPXPXPXPXPXPXPXPXPMVSKGEEDNMAIIKEFMRFKVHMEGSVNGHEFEIEGEGEGRPYEGTQTAKLKVTKGGPLPFAWDILSPQFMYGSKAYVKHPADIPDYLKLSFPEGFKWERVMNFEDGGVVTVTQDSSLQDGEFIYKVKLRGTNFPSDGPVMQKKTMGWEASSERMYPEDGALKGEIKQRLKLKDGGHYDAEVKTTYKAKKPVQLPGAYNVNIKLDITSHNEDYTIVEQYERAEGRHSTGGMDELYK

SEQ ID NO: 172 - protein, 1571 aa, synthetic construct
  REGION 1..1571: note = SYNTHETIC
  VARIANT 1308: note = X can be any naturally occurring amino acid
  VARIANT 1310: note = X can be any naturally occurring amino acid
  VARIANT 1312: note = X can be any naturally occurring amino acid
  VARIANT 1314: note = X can be any naturally occurring amino acid
  VARIANT 1316: note = X can be any naturally occurring amino acid
  VARIANT 1318: note = X can be any naturally occurring amino acid
  VARIANT 1320: note = X can be any naturally occurring amino acid
  VARIANT 1322: note = X can be any naturally occurring amino acid
  VARIANT 1324: note = X can be any naturally occurring amino acid
  VARIANT 1326: note = X can be any naturally occurring amino acid
  VARIANT 1328: note = X can be any naturally occurring amino acid
  VARIANT 1330: note = X can be any naturally occurring amino acid
  VARIANT 1332: note = X can be any naturally occurring amino acid
  VARIANT 1334: note = X can be any naturally occurring amino acid
MTQFEGFTNLYQVSKTLRFELIPQGKTLKHIQEQGFIEEDKARNDHYKELKPIIDRIYKTYADQCLQLVQLDWENLSAAIDSYRKEKTEETRNALIEEQATYRNAIHDYFIGRTDNLTDAINKRHAEIYKGLFKAELFNGKVLKQLGTVTTTEHENALLRSFDKFTTYFSGFYENRKNVFSAEDISTAIPHRIVQDNFPKFKENCHIFTRLITAVPSLREHFENVKKAIGIFVSTSIEEVFSFPFYNQLLTQTQIDLYNQLLGGISREAGTEKIKGLNEVLNLAIQKNDETAHIIASLPHRFIPLFKQILSDRNTLSFILEEFKSDEEVIQSFCKYKTLLRNENVLETAEALFNELNSIDLTHIFISHKKLETISSALCDHWDTLRNALYERRISELTGKITKSAKEKVQRSLKHEDINLQEIISAAGKELSEAFKQKTSEILSHAHAALDQPLPTTLKKQEEKEILKSQLDSLLGLYHLLDWFAVDESNEVDPEFSARLTGIKLEMEPSLSFYNKARNYATKKPYSVEKFKLNFQMPTLASGWDVNKEKNNGAILFVKNGLYYLGIMPKQKGRYKALSFEPTEKTSEGFDKMYYDYFPDAAKMIPKCSTQLKAVTAHFQTHTTPILLSNNFIEPLEITKEIYDLNNPEKEPKKFQTAYAKKTGDQKGYREALCKWIDFTRDFLSKYTKTTSIDLSSLRPSSQYKDLGEYYAELNPLLYHISFQRIAEKEIMDAVETGKLYLFQIYNKDFAKGHHGKPNLHTLYWTGLFSPENLAKTSIKLNGQAELFYRPKSRMKRMAHRLGEKMLNKKLKDQKTPIPDTLYQELYDYVNHRLSHDLSDEARALLPNVITKEVSHEIIKDRRFTSDKFFFHVPITLNYQAANSPSKFNQRVNAYLKEHPETPIIGIDRGERNLIYITVIDSTGKILEQRSLNTIQQFDYQKKLDNREKERVAARQAWSVVGTIKDLKQGYLSQVIHEIVDLMIHYQAVVVLENLNFGFKSKRTGIAEKAVYQQFEKMLIDKLNCLVLKDYPAEKVGGVLNPYQLTDQFTSFAKMGTQSGFLFYVPAPYTSKIDPLTGFVDPFVWKTIKNHESRKHFLEGFDFLHYDVKTGDFILHFKMNRNLSFQRGLPGFMPAWDIVFEKNETQFDAKGTPFIAGKRIVPVIENHRFTGRYRDLYPANELIALLEEKGIVFRDGSNILPKLLENDDSHAIDTMVALIRSVLQMRNSNAATGEDYINSPVRDLNGVCFDSRFQNPEWPMDADANGAYHIALKGQLLLNHLKESKDLKLQNGISNQDWLAYIQELRNXPXPXPXPXPXPXPXPXPXPXPXPXPXPMVSKGEEDNMAIIKEFMRFKVHMEGSVNGHEFEIEGEGEGRPYEGTQTAKLKVTKGGPLPFAWDILSPQFMYGSKAYVKHPADIPDYLKLSFPEGFKWERVMNFEDGGVVTVTQDSSLQDGEFIYKVKLRGTNFPSDGPVMQKKTMGWEASSERMYPEDGALKGEIKQRLKLKDGGHYDAEVKTTYKAKKPVQLPGAYNVNIKLDITSHNEDYTIVEQYERAEGRHSTGGMDELYK

SEQ ID NO: 173 - protein, 1558 aa, synthetic construct
  REGION 1..1558: note = SYNTHETIC
MTQFEGFTNLYQVSKTLRFELIPQGKTLKHIQEQGFIEEDKARNDHYKELKPIIDRIYKTYADQCLQLVQLDWENLSAAIDSYRKEKTEETRNALIEEQATYRNAIHDYFIGRTDNLTDAINKRHAEIYKGLFKAELFNGKVLKQLGTVTTTEHENALLRSFDKFTTYFSGFYENRKNVFSAEDISTAIPHRIVQDNFPKFKENCHIFTRLITAVPSLREHFENVKKAIGIFVSTSIEEVFSFPFYNQLLTQTQIDLYNQLLGGISREAGTEKIKGLNEVLNLAIQKNDETAHIIASLPHRFIPLFKQILSDRNTLSFILEEFKSDEEVIQSFCKYKTLLRNENVLETAEALFNELNSIDLTHIFISHKKLETISSALCDHWDTLRNALYERRISELTGKITKSAKEKVQRSLKHEDINLQEIISAAGKELSEAFKQKTSEILSHAHAALDQPLPTTLKKQEEKEILKSQLDSLLGLYHLLDWFAVDESNEVDPEFSARLTGIKLEMEPSLSFYNKARNYATKKPYSVEKFKLNFQMPTLASGWDVNKEKNNGAILFVKNGLYYLGIMPKQKGRYKALSFEPTEKTSEGFDKMYYDYFPDAAKMIPKCSTQLKAVTAHFQTHTTPILLSNNFIEPLEITKEIYDLNNPEKEPKKFQTAYAKKTGDQKGYREALCKWIDFTRDFLSKYTKTTSIDLSSLRPSSQYKDLGEYYAELNPLLYHISFQRIAEKEIMDAVETGKLYLFQIYNKDFAKGHHGKPNLHTLYWTGLFSPENLAKTSIKLNGQAELFYRPKSRMKRMAHRLGEKMLNKKLKDQKTPIPDTLYQELYDYVNHRLSHDLSDEARALLPNVITKEVSHEIIKDRRFTSDKFFFHVPITLNYQAANSPSKFNQRVNAYLKEHPETPIIGIDRGERNLIYITVIDSTGKILEQRSLNTIQQFDYQKKLDNREKERVAARQAWSVVGTIKDLKQGYLSQVIHEIVDLMIHYQAVVVLENLNFGFKSKRTGIAEKAVYQQFEKMLIDKLNCLVLKDYPAEKVGGVLNPYQLTDQFTSFAKMGTQSGFLFYVPAPYTSKIDPLTGFVDPFVWKTIKNHESRKHFLEGFDFLHYDVKTGDFILHFKMNRNLSFQRGLPGFMPAWDIVFEKNETQFDAKGTPFIAGKRIVPVIENHRFTGRYRDLYPANELIALLEEKGIVFRDGSNILPKLLENDDSHAIDTMVALIRSVLQMRNSNAATGEDYINSPVRDLNGVCFDSRFQNPEWPMDADANGAYHIALKGQLLLNHLKESKDLKLQNGISNQDWLAYIQELRNGGGGSEAAAKGGGGSMVSKGEEDNMAIIKEFMRFKVHMEGSVNGHEFEIEGEGEGRPYEGTQTAKLKVTKGGPLPFAWDILSPQFMYGSKAYVKHPADIPDYLKLSFPEGFKWERVMNFEDGGVVTVTQDSSLQDGEFIYKVKLRGTNFPSDGPVMQKKTMGWEASSERMYPEDGALKGEIKQRLKLKDGGHYDAEVKTTYKAKKPVQLPGAYNVNIKLDITSHNEDYTIVEQYERAEGRHSTGGMDELYK

SEQ ID NO: 174 - protein, 1479 aa, synthetic construct
  REGION 1..1479: note = SYNTHETIC
MSKLEKFTNCYSLSKTLRFKAIPVGKTQENIDNKRLLVEDEKRAEDYKGVKKLLDRYYLSFINDVLHSIKLKNLNNYISLFRKKTRTEKENKELENLEINLRKEIAKAFKGNEGYKSLFKKDIIETILPEFLDDKDEIALVNSFNGFTTAFTGFFDNRENMFSEEAKSTSIAFRCINENLTRYISNMDIFEKVDAIFDKHEVQEIKEKILNSDYDVEDFFEGEFFNFVLTQEGIDVYNAIIGGFVTESGEKIKGLNEYINLYNQKTKQKLPKFKPLYKQVLSDRESLSFYGEGYTSDEEVLEVFRNTLNKNSEIFSSIKKLEKLFKNFDEYSSAGIFVKNGPAISTISKDIFGEWNVIRDKWNAEYDDIHLKKKAVVTEKYEDDRRKSFKKIGSFSLEQLQEYADADLSVVEKLKEIIIQKVDEIYKVYGSSEKLFDADFVLEKSLKKNDAVVAIMKDLLDSVKSFENYIKAFFGEGKETNRDESFYGDFVLAYDILLKVDHIYDAIRNYVTQKPYSKDKFKLYFQNPQFMGGWDKDKETDYRATILRYGSKYYLAIMDKKYAKCLQKIDKDDVNGNYEKINYKLLPGPNKMLPKVFFSKKWMAYYNPSEDIQKIYKNGTFKKGDMFNLNDCHKLIDFFKDSISRYPKWSNAYDFNFSETEKYKDIAGFYREVEEQGYKVSFESASKKEVDKLVEEGKLYMFQIYNKDFSDKSHGTPNLHTMYFKLLFDENNHGQIRLSGGAELFMRRASLKKEELVVHPANSPIANKNPDNPKKTTTLSYDVYKDKRFSEDQYELHIPIAINKCPKNIFKINTEVRVLLKHDDNPYVIGIDRGERNLLYIVVVDGKGNIVEQYSLNEIINNFNGIRIKTDYHSLLDKKEKERFEARQNWTSIENIKELKAGYISQVVHKICELVEKYDAVIALEDLNSGFKNSRVKVEKQVYQKFEKMLIDKLNYMVDKKSNPCATGGALKGYQITNKFESFKSMSTQNGFIFYIPAWLTSKIDPSTGFVNLLKTKYTSIADSKKFISSFDRIMYVPEEDLFEFALDYKNFSRTDADYIKKWKLYSYGNRIRIFRNPKKNNVFDWEEVCLTSAYKELFNKYGINYQQGDIRALLCEQSDKAFYSSFMALMSLMLQMRNSITGRTDVDFLISPVKNSDGIFYDSRNYEAQENAILPKNADANGAYNIARKVLWAIGQFKKAEDEKLDKVKIAISNKEWLEYAQTSVKHGSAGSAAGSGEFMVSKGEELFTGVVPILVELDGDVNGHKFSVSGEGEGDATYGKLTLKFICTTGKLPVPWPTLVTTLTYGVQCFSRYPDHMKQHDFFKSAMPEGYVQERTIFFKDDGNYKTRAEVKFEGDTLVNRIELKGIDFKEDGNILGHKLEYNYNSHNVYIMADKQKNGIKVNFKIRHNIEDGSVQLADHYQQNTPIGDGPVLLPDNHYLSTQSALSKDPNEKRDHMVLLEFVTAAGITLGMDELYK

SEQ ID NO: 175 - protein, 1487 aa, synthetic construct
  REGION 1..1487: note = SYNTHETIC
MSKLEKFTNCYSLSKTLRFKAIPVGKTQENIDNKRLLVEDEKRAEDYKGVKKLLDRYYLSFINDVLHSIKLKNLNNYISLFRKKTRTEKENKELENLEINLRKEIAKAFKGNEGYKSLFKKDIIETILPEFLDDKDEIALVNSFNGFTTAFTGFFDNRENMFSEEAKSTSIAFRCINENLTRYISNMDIFEKVDAIFDKHEVQEIKEKILNSDYDVEDFFEGEFFNFVLTQEGIDVYNAIIGGFVTESGEKIKGLNEYINLYNQKTKQKLPKFKPLYKQVLSDRESLSFYGEGYTSDEEVLEVFRNTLNKNSEIFSSIKKLEKLFKNFDEYSSAGIFVKNGPAISTISKDIFGEWNVIRDKWNAEYDDIHLKKKAVVTEKYEDDRRKSFKKIGSFSLEQLQEYADADLSVVEKLKEIIIQKVDEIYKVYGSSEKLFDADFVLEKSLKKNDAVVAIMKDLLDSVKSFENYIKAFFGEGKETNRDESFYGDFVLAYDILLKVDHIYDAIRNYVTQKPYSKDKFKLYFQNPQFMGGWDKDKETDYRATILRYGSKYYLAIMDKKYAKCLQKIDKDDVNGNYEKINYKLLPGPNKMLPKVFFSKKWMAYYNPSEDIQKIYKNGTFKKGDMFNLNDCHKLIDFFKDSISRYPKWSNAYDFNFSETEKYKDIAGFYREVEEQGYKVSFESASKKEVDKLVEEGKLYMFQIYNKDFSDKSHGTPNLHTMYFKLLFDENNHGQIRLSGGAELFMRRASLKKEELVVHPANSPIANKNPDNPKKTTTLSYDVYKDKRFSEDQYELHIPIAINKCPKNIFKINTEVRVLLKHDDNPYVIGIDRGERNLLYIVVVDGKGNIVEQYSLNEIINNFNGIRIKTDYHSLLDKKEKERFEARQNWTSIENIKELKAGYISQVVHKICELVEKYDAVIALEDLNSGFKNSRVKVEKQVYQKFEKMLIDKLNYMVDKKSNPCATGGALKGYQITNKFESFKSMSTQNGFIFYIPAWLTSKIDPSTGFVNLLKTKYTSIADSKKFISSFDRIMYVPEEDLFEFALDYKNFSRTDADYIKKWKLYSYGNRIRIFRNPKKNNVFDWEEVCLTSAYKELFNKYGINYQQGDIRALLCEQSDKAFYSSFMALMSLMLQMRNSITGRTDVDFLISPVKNSDGIFYDSRNYEAQENAILPKNADANGAYNIARKVLWAIGQFKKAEDEKLDKVKIAISNKEWLEYAQTSVKHGGGGSGGGGSGGGGSGGGGSMVSKGEELFTGVVPILVELDGDVNGHKFSVSGEGEGDATYGKLTLKFICTTGKLPVPWPTLVTTLTYGVQCFSRYPDHMKQHDFFKSAMPEGYVQERTIFFKDDGNYKTRAEVKFEGDTLVNRIELKGIDFKEDGNILGHKLEYNYNSHNVYIMADKQKNGIKVNFKIRHNIEDGSVQLADHYQQNTPIGDGPVLLPDNHYLSTQSALSKDPNEKRDHMVLLEFVTAAGITLGMDELYK

SEQ ID NO: 176 - protein, 1489 aa, synthetic construct
  REGION 1..1489: note = SYNTHETIC
MSKLEKFTNCYSLSKTLRFKAIPVGKTQENIDNKRLLVEDEKRAEDYKGVKKLLDRYYLSFINDVLHSIKLKNLNNYISLFRKKTRTEKENKELENLEINLRKEIAKAFKGNEGYKSLFKKDIIETILPEFLDDKDEIALVNSFNGFTTAFTGFFDNRENMFSEEAKSTSIAFRCINENLTRYISNMDIFEKVDAIFDKHEVQEIKEKILNSDYDVEDFFEGEFFNFVLTQEGIDVYNAIIGGFVTESGEKIKGLNEYINLYNQKTKQKLPKFKPLYKQVLSDRESLSFYGEGYTSDEEVLEVFRNTLNKNSEIFSSIKKLEKLFKNFDEYSSAGIFVKNGPAISTISKDIFGEWNVIRDKWNAEYDDIHLKKKAVVTEKYEDDRRKSFKKIGSFSLEQLQEYADADLSVVEKLKEIIIQKVDEIYKVYGSSEKLFDADFVLEKSLKKNDAVVAIMKDLLDSVKSFENYIKAFFGEGKETNRDESFYGDFVLAYDILLKVDHIYDAIRNYVTQKPYSKDKFKLYFQNPQFMGGWDKDKETDYRATILRYGSKYYLAIMDKKYAKCLQKIDKDDVNGNYEKINYKLLPGPNKMLPKVFFSKKWMAYYNPSEDIQKIYKNGTFKKGDMFNLNDCHKLIDFFKDSISRYPKWSNAYDFNFSETEKYKDIAGFYREVEEQGYKVSFESASKKEVDKLVEEGKLYMFQIYNKDFSDKSHGTPNLHTMYFKLLFDENNHGQIRLSGGAELFMRRASLKKEELVVHPANSPIANKNPDNPKKTTTLSYDVYKDKRFSEDQYELHIPIAINKCPKNIFKINTEVRVLLKHDDNPYVIGIDRGERNLLYIVVVDGKGNIVEQYSLNEIINNFNGIRIKTDYHSLLDKKEKERFEARQNWTSIENIKELKAGYISQVVHKICELVEKYDAVIALEDLNSGFKNSRVKVEKQVYQKFEKMLIDKLNYMVDKKSNPCATGGALKGYQITNKFESFKSMSTQNGFIFYIPAWLTSKIDPSTGFVNLLKTKYTSIADSKKFISSFDRIMYVPEEDLFEFALDYKNFSRTDADYIKKWKLYSYGNRIRIFRNPKKNNVFDWEEVCLTSAYKELFNKYGINYQQGDIRALLCEQSDKAFYSSFMALMSLMLQMRNSITGRTDVDFLISPVKNSDGIFYDSRNYEAQENAILPKNADANGAYNIARKVLWAIGQFKKAEDEKLDKVKIAISNKEWLEYAQTSVKHAEAAAKEAAAKEAAAKEAAAKAMVSKGEELFTGVVPILVELDGDVNGHKFSVSGEGEGDATYGKLTLKFICTTGKLPVPWPTLVTTLTYGVQCFSRYPDHMKQHDFFKSAMPEGYVQERTIFFKDDGNYKTRAEVKFEGDTLVNRIELKGIDFKEDGNILGHKLEYNYNSHNVYIMADKQKNGIKVNFKIRHNIEDGSVQLADHYQQNTPIGDGPVLLPDNHYLSTQSALSKDPNEKRDHMVLLEFVTAAGITLGMDELYK

SEQ ID NO: 177 - protein, 1513 aa, synthetic construct
  REGION 1..1513: note = SYNTHETIC
MSKLEKFTNCYSLSKTLRFKAIPVGKTQENIDNKRLLVEDEKRAEDYKGVKKLLDRYYLSFINDVLHSIKLKNLNNYISLFRKKTRTEKENKELENLEINLRKEIAKAFKGNEGYKSLFKKDIIETILPEFLDDKDEIALVNSFNGFTTAFTGFFDNRENMFSEEAKSTSIAFRCINENLTRYISNMDIFEKVDAIFDKHEVQEIKEKILNSDYDVEDFFEGEFFNFVLTQEGIDVYNAIIGGFVTESGEKIKGLNEYINLYNQKTKQKLPKFKPLYKQVLSDRESLSFYGEGYTSDEEVLEVFRNTLNKNSEIFSSIKKLEKLFKNFDEYSSAGIFVKNGPAISTISKDIFGEWNVIRDKWNAEYDDIHLKKKAVVTEKYEDDRRKSFKKIGSFSLEQLQEYADADLSVVEKLKEIIIQKVDEIYKVYGSSEKLFDADFVLEKSLKKNDAVVAIMKDLLDSVKSFENYIKAFFGEGKETNRDESFYGDFVLAYDILLKVDHIYDAIRNYVTQKPYSKDKFKLYFQNPQFMGGWDKDKETDYRATILRYGSKYYLAIMDKKYAKCLQKIDKDDVNGNYEKINYKLLPGPNKMLPKVFFSKKWMAYYNPSEDIQKIYKNGTFKKGDMFNLNDCHKLIDFFKDSISRYPKWSNAYDFNFSETEKYKDIAGFYREVEEQGYKVSFESASKKEVDKLVEEGKLYMFQIYNKDFSDKSHGTPNLHTMYFKLLFDENNHGQIRLSGGAELFMRRASLKKEELVVHPANSPIANKNPDNPKKTTTLSYDVYKDKRFSEDQYELHIPIAINKCPKNIFKINTEVRVLLKHDDNPYVIGIDRGERNLLYIVVVDGKGNIVEQYSLNEIINNFNGIRIKTDYHSLLDKKEKERFEARQNWTSIENIKELKAGYISQVVHKICELVEKYDAVIALEDLNSGFKNSRVKVEKQVYQKFEKMLIDKLNYMVDKKSNPCATGGALKGYQITNKFESFKSMSTQNGFIFYIPAWLTSKIDPSTGFVNLLKTKYTSIADSKKFISSFDRIMYVPEEDLFEFALDYKNFSRTDADYIKKWKLYSYGNRIRIFRNPKKNNVFDWEEVCLTSAYKELFNKYGINYQQGDIRALLCEQSDKAFYSSFMALMSLMLQMRNSITGRTDVDFLISPVKNSDGIFYDSRNYEAQENAILPKNADANGAYNIARKVLWAIGQFKKAEDEKLDKVKIAISNKEWLEYAQTSVKHAEAAAKEAAAKEAAAKEAAAKALEAEAAAKEAAAKEAAAKEAAAKAMVSKGEELFTGVVPILVELDGDVNGHKFSVSGEGEGDATYGKLTLKFICTTGKLPVPWPTLVTTLTYGVQCFSRYPDHMKQHDFFKSAMPEGYVQERTIFFKDDGNYKTRAEVKFEGDTLVNRIELKGIDFKEDGNILGHKLEYNYNSHNVYIMADKQKNGIKVNFKIRHNIEDGSVQLADHYQQNTPIGDGPVLLPDNHYLSTQSALSKDPNEKRDHMVLLEFVTAAGITLGMDELYK

SEQ ID NO: 178 - protein, 1517 aa, synthetic construct
  REGION 1..1517: note = SYNTHETIC
MSKLEKFTNCYSLSKTLRFKAIPVGKTQENIDNKRLLVEDEKRAEDYKGVKKLLDRYYLSFINDVLHSIKLKNLNNYISLFRKKTRTEKENKELENLEINLRKEIAKAFKGNEGYKSLFKKDIIETILPEFLDDKDEIALVNSFNGFTTAFTGFFDNRENMFSEEAKSTSIAFRCINENLTRYISNMDIFEKVDAIFDKHEVQEIKEKILNSDYDVEDFFEGEFFNFVLTQEGIDVYNAIIGGFVTESGEKIKGLNEYINLYNQKTKQKLPKFKPLYKQVLSDRESLSFYGEGYTSDEEVLEVFRNTLNKNSEIFSSIKKLEKLFKNFDEYSSAGIFVKNGPAISTISKDIFGEWNVIRDKWNAEYDDIHLKKKAVVTEKYEDDRRKSFKKIGSFSLEQLQEYADADLSVVEKLKEIIIQKVDEIYKVYGSSEKLFDADFVLEKSLKKNDAVVAIMKDLLDSVKSFENYIKAFFGEGKETNRDESFYGDFVLAYDILLKVDHIYDAIRNYVTQKPYSKDKFKLYFQNPQFMGGWDKDKETDYRATILRYGSKYYLAIMDKKYAKCLQKIDKDDVNGNYEKINYKLLPGPNKMLPKVFFSKKWMAYYNPSEDIQKIYKNGTFKKGDMFNLNDCHKLIDFFKDSISRYPKWSNAYDFNFSETEKYKDIAGFYREVEEQGYKVSFESASKKEVDKLVEEGKLYMFQIYNKDFSDKSHGTPNLHTMYFKLLFDENNHGQIRLSGGAELFMRRASLKKEELVVHPANSPIANKNPDNPKKTTTLSYDVYKDKRFSEDQYELHIPIAINKCPKNIFKINTEVRVLLKHDDNPYVIGIDRGERNLLYIVVVDGKGNIVEQYSLNEIINNFNGIRIKTDYHSLLDKKEKERFEARQNWTSIENIKELKAGYISQVVHKICELVEKYDAVIALEDLNSGFKNSRVKVEKQVYQKFEKMLIDKLNYMVDKKSNPCATGGALKGYQITNKFESFKSMSTQNGFIFYIPAWLTSKIDPSTGFVNLLKTKYTSIADSKKFISSFDRIMYVPEEDLFEFALDYKNFSRTDADYIKKWKLYSYGNRIRIFRNPKKNNVFDWEEVCLTSAYKELFNKYGINYQQGDIRALLCEQSDKAFYSSFMALMSLMLQMRNSITGRTDVDFLISPVKNSDGIFYDSRNYEAQENAILPKNADANGAYNIARKVLWAIGQFKKAEDEKLDKVKIAISNKEWLEYAQTSVKHLEAEAAAKEAAAKEAAAKEAAAKALEAEAAAKEAAAKEAAAKEAAAKALEMVSKGEELFTGVVPILVELDGDVNGHKFSVSGEGEGDATYGKLTLKFICTTGKLPVPWPTLVTTLTYGVQCFSRYPDHMKQHDFFKSAMPEGYVQERTIFFKDDGNYKTRAEVKFEGDTLVNRIELKGIDFKEDGNILGHKLEYNYNSHNVYIMADKQKNGIKVNFKIRHNIEDGSVQLADHYQQNTPIGDGPVLLPDNHYLSTQSALSKDPNEKRDHMVLLEFVTAAGITLGMDELYK

SEQ ID NO: 179 - protein, 1470 aa, synthetic construct
  REGION 1..1470: note = SYNTHETIC
MSKLEKFTNCYSLSKTLRFKAIPVGKTQENIDNKRLLVEDEKRAEDYKGVKKLLDRYYLSFINDVLHSIKLKNLNNYISLFRKKTRTEKENKELENLEINLRKEIAKAFKGNEGYKSLFKKDIIETILPEFLDDKDEIALVNSFNGFTTAFTGFFDNRENMFSEEAKSTSIAFRCINENLTRYISNMDIFEKVDAIFDKHEVQEIKEKILNSDYDVEDFFEGEFFNFVLTQEGIDVYNAIIGGFVTESGEKIKGLNEYINLYNQKTKQKLPKFKPLYKQVLSDRESLSFYGEGYTSDEEVLEVFRNTLNKNSEIFSSIKKLEKLFKNFDEYSSAGIFVKNGPAISTISKDIFGEWNVIRDKWNAEYDDIHLKKKAVVTEKYEDDRRKSFKKIGSFSLEQLQEYADADLSVVEKLKEIIIQKVDEIYKVYGSSEKLFDADFVLEKSLKKNDAVVAIMKDLLDSVKSFENYIKAFFGEGKETNRDESFYGDFVLAYDILLKVDHIYDAIRNYVTQKPYSKDKFKLYFQNPQFMGGWDKDKETDYRATILRYGSKYYLAIMDKKYAKCLQKIDKDDVNGNYEKINYKLLPGPNKMLPKVFFSKKWMAYYNPSEDIQKIYKNGTFKKGDMFNLNDCHKLIDFFKDSISRYPKWSNAYDFNFSETEKYKDIAGFYREVEEQGYKVSFESASKKEVDKLVEEGKLYMFQIYNKDFSDKSHGTPNLHTMYFKLLFDENNHGQIRLSGGAELFMRRASLKKEELVVHPANSPIANKNPDNPKKTTTLSYDVYKDKRFSEDQYELHIPIAINKCPKNIFKINTEVRVLLKHDDNPYVIGIDRGERNLLYIVVVDGKGNIVEQYSLNEIINNFNGIRIKTDYHSLLDKKEKERFEARQNWTSIENIKELKAGYISQVVHKICELVEKYDAVIALEDLNSGFKNSRVKVEKQVYQKFEKMLIDKLNYMVDKKSNPCATGGALKGYQITNKFESFKSMSTQNGFIFYIPAWLTSKIDPSTGFVNLLKTKYTSIADSKKFISSFDRIMYVPEEDLFEFALDYKNFSRTDADYIKKWKLYSYGNRIRIFRNPKKNNVFDWEEVCLTSAYKELFNKYGINYQQGDIRALLCEQSDKAFYSSFMALMSLMLQMRNSITGRTDVDFLISPVKNSDGIFYDSRNYEAQENAILPKNADANGAYNIARKVLWAIGQFKKAEDEKLDKVKIAISNKEWLEYAQTSVKHAPAMVSKGEELFTGVVPILVELDGDVNGHKFSVSGEGEGDATYGKLTLKFICTTGKLPVPWPTLVTTLTYGVQCFSRYPDHMKQHDFFKSAMPEGYVQERTIFFKDDGNYKTRAEVKFEGDTLVNRIELKGIDFKEDGNILGHKLEYNYNSHNVYIMADKQKNGIKVNFKIRHNIEDGSVQLADHYQQNTPIGDGPVLLPDNHYLSTQSALSKDPNEKRDHMVLLEFVTAAGITLGMDELYK

SEQ ID NO: 180 - protein, 1472 aa, synthetic construct
  REGION 1..1472: note = SYNTHETIC
MSKLEKFTNCYSLSKTLRFKAIPVGKTQENIDNKRLLVEDEKRAEDYKGVKKLLDRYYLSFINDVLHSIKLKNLNNYISLFRKKTRTEKENKELENLEINLRKEIAKAFKGNEGYKSLFKKDIIETILPEFLDDKDEIALVNSFNGFTTAFTGFFDNRENMFSEEAKSTSIAFRCINENLTRYISNMDIFEKVDAIFDKHEVQEIKEKILNSDYDVEDFFEGEFFNFVLTQEGIDVYNAIIGGFVTESGEKIKGLNEYINLYNQKTKQKLPKFKPLYKQVLSDRESLSFYGEGYTSDEEVLEVFRNTLNKNSEIFSSIKKLEKLFKNFDEYSSAGIFVKNGPAISTISKDIFGEWNVIRDKWNAEYDDIHLKKKAVVTEKYEDDRRKSFKKIGSFSLEQLQEYADADLSVVEKLKEIIIQKVDEIYKVYGSSEKLFDADFVLEKSLKKNDAVVAIMKDLLDSVKSFENYIKAFFGEGKETNRDESFYGDFVLAYDILLKVDHIYDAIRNYVTQKPYSKDKFKLYFQNPQFMGGWDKDKETDYRATILRYGSKYYLAIMDKKYAKCLQKIDKDDVNGNYEKINYKLLPGPNKMLPKVFFSKKWMAYYNPSEDIQKIYKNGTFKKGDMFNLNDCHKLIDFFKDSISRYPKWSNAYDFNFSETEKYKDIAGFYREVEEQGYKVSFESASKKEVDKLVEEGKLYMFQIYNKDFSDKSHGTPNLHTMYFKLLFDENNHGQIRLSGGAELFMRRASLKKEELVVHPANSPIANKNPDNPKKTTTLSYDVYKDKRFSEDQYELHIPIAINKCPKNIFKINTEVRVLLKHDDNPYVIGIDRGERNLLYIVVVDGKGNIVEQYSLNEIINNFNGIRIKTDYHSLLDKKEKERFEARQNWTSIENIKELKAGYISQVVHKICELVEKYDAVIALEDLNSGFKNSRVKVEKQVYQKFEKMLIDKLNYMVDKKSNPCATGGALKGYQITNKFESFKSMSTQNGFIFYIPAWLTSKIDPSTGFVNLLKTKYTSIADSKKFISSFDRIMYVPEEDLFEFALDYKNFSRTDADYIKKWKLYSYGNRIRIFRNPKKNNVFDWEEVCLTSAYKELFNKYGINYQQGDIRALLCEQSDKAFYSSFMALMSLMLQMRNSITGRTDVDFLISPVKNSDGIFYDSRNYEAQENAILPKNADANGAYNIARKVLWAIGQFKKAEDEKLDKVKIAISNKEWLEYAQTSVKHAPAPAMVSKGEELFTGVVPILVELDGDVNGHKFSVSGEGEGDATYGKLTLKFICTTGKLPVPWPTLVTTLTYGVQCFSRYPDHMKQHDFFKSAMPEGYVQERTIFFKDDGNYKTRAEVKFEGDTLVNRIELKGIDFKEDGNILGHKLEYNYNSHNVYIMADKQKNGIKVNFKIRHNIEDGSVQLADHYQQNTPIGDGPVLLPDNHYLSTQSALSKDPNEKRDHMVLLEFVTAAGITLGMDELYK

SEQ ID NO: 181 - protein, 1474 aa, synthetic construct
  REGION 1..1474: note = SYNTHETIC
MSKLEKFTNCYSLSKTLRFKAIPVGKTQENIDNKRLLVEDEKRAEDYKGVKKLLDRYYLSFINDVLHSIKLKNLNNYISLFRKKTRTEKENKELENLEINLRKEIAKAFKGNEGYKSLFKKDIIETILPEFLDDKDEIALVNSFNGFTTAFTGFFDNRENMFSEEAKSTSIAFRCINENLTRYISNMDIFEKVDAIFDKHEVQEIKEKILNSDYDVEDFFEGEFFNFVLTQEGIDVYNAIIGGFVTESGEKIKGLNEYINLYNQKTKQKLPKFKPLYKQVLSDRESLSFYGEGYTSDEEVLEVFRNTLNKNSEIFSSIKKLEKLFKNFDEYSSAGIFVKNGPAISTISKDIFGEWNVIRDKWNAEYDDIHLKKKAVVTEKYEDDRRKSFKKIGSFSLEQLQEYADADLSVVEKLKEIIIQKVDEIYKVYGSSEKLFDADFVLEKSLKKNDAVVAIMKDLLDSVKSFENYIKAFFGEGKETNRDESFYGDFVLAYDILLKVDHIYDAIRNYVTQKPYSKDKFKLYFQNPQFMGGWDKDKETDYRATILRYGSKYYLAIMDKKYAKCLQKIDKDDVNGNYEKINYKLLPGPNKMLPKVFFSKKWMAYYNPSEDIQKIYKNGTFKKGDMFNLNDCHKLIDFFKDSISRYPKWSNAYDFNFSETEKYKDIAGFYREVEEQGYKVSFESASKKEVDKLVEEGKLYMFQIYNKDFSDKSHGTPNLHTMYFKLLFDENNHGQIRLSGGAELFMRRASLKKEELVVHPANSPIANKNPDNPKKTTTLSYDVYKDKRFSEDQYELHIPIAINKCPKNIFKINTEVRVLLKHDDNPYVIGIDRGERNLLYIVVVDGKGNIVEQYSLNEIINNFNGIRIKTDYHSLLDKKEKERFEARQNWTSIENIKELKAGYISQVVHKICELVEKYDAVIALEDLNSGFKNSRVKVEKQVYQKFEKMLIDKLNYMVDKKSNPCATGGALKGYQITNKFESFKSMSTQNGFIFYIPAWLTSKIDPSTGFVNLLKTKYTSIADSKKFISSFDRIMYVPEEDLFEFALDYKNFSRTDADYIKKWKLYSYGNRIRIFRNPKKNNVFDWEEVCLTSAYKELFNKYGINYQQGDIRALLCEQSDKAFYSSFMALMSLMLQMRNSITGRTDVDFLISPVKNSDGIFYDSRNYEAQENAILPKNADANGAYNIARKVLWAIGQFKKAEDEKLDKVKIAISNKEWLEYAQTSVKHAPAPAPAMVSKGEELFTGVVPILVELDGDVNGHKFSVSGEGEGDATYGKLTLKFICTTGKLPVPWPTLVTTLTYGVQCFSRYPDHMKQHDFFKSAMPEGYVQERTIFFKDDGNYKTRAEVKFEGDTLVNRIELKGIDFKEDGNILGHKLEYNYNSHNVYIMADKQKNGIKVNFKIRHNIEDGSVQLADHYQQNTPIGDGPVLLPDNHYLSTQSALSKDPNEKRDHMVLLEFVTAAGITLGMDELYK

SEQ ID NO: 182 - protein, 1476 aa, synthetic construct
  REGION 1..1476: note = SYNTHETIC
MSKLEKFTNCYSLSKTLRFKAIPVGKTQENIDNKRLLVEDEKRAEDYKGVKKLLDRYYLSFINDVLHSIKLKNLNNYISLFRKKTRTEKENKELENLEINLRKEIAKAFKGNEGYKSLFKKDIIETILPEFLDDKDEIALVNSFNGFTTAFTGFFDNRENMFSEEAKSTSIAFRCINENLTRYISNMDIFEKVDAIFDKHEVQEIKEKILNSDYDVEDFFEGEFFNFVLTQEGIDVYNAIIGGFVTESGEKIKGLNEYINLYNQKTKQKLPKFKPLYKQVLSDRESLSFYGEGYTSDEEVLEVFRNTLNKNSEIFSSIKKLEKLFKNFDEYSSAGIFVKNGPAISTISKDIFGEWNVIRDKWNAEYDDIHLKKKAVVTEKYEDDRRKSFKKIGSFSLEQLQEYADADLSVVEKLKEIIIQKVDEIYKVYGSSEKLFDADFVLEKSLKKNDAVVAIMKDLLDSVKSFENYIKAFFGEGKETNRDESFYGDFVLAYDILLKVDHIYDAIRNYVTQKPYSKDKFKLYFQNPQFMGGWDKDKETDYRATILRYGSKYYLAIMDKKYAKCLQKIDKDDVNGNYEKINYKLLPGPNKMLPKVFFSKKWMAYYNPSEDIQKIYKNGTFKKGDMFNLNDCHKLIDFFKDSISRYPKWSNAYDFNFSETEKYKDIAGFYREVEEQGYKVSFESASKKEVDKLVEEGKLYMFQIYNKDFSDKSHGTPNLHTMYFKLLFDENNHGQIRLSGGAELFMRRASLKKEELVVHPANSPIANKNPDNPKKTTTLSYDVYKDKRFSEDQYELHIPIAINKCPKNIFKINTEVRVLLKHDDNPYVIGIDRGERNLLYIVVVDGKGNIVEQYSLNEIINNFNGIRIKTDYHSLLDKKEKERFEARQNWTSIENIKELKAGYISQVVHKICELVEKYDAVIALEDLNSGFKNSRVKVEKQVYQKFEKMLIDKLNYMVDKKSNPCATGGALKGYQITNKFESFKSMSTQNGFIFYIPAWLTSKIDPSTGFVNLLKTKYTSIADSKKFISSFDRIMYVPEEDLFEFALDYKNFSRTDADYIKKWKLYSYGNRIRIFRNPKKNNVFDWEEVCLTSAYKELFNKYGINYQQGDIRALLCEQSDKAFYSSFMALMSLMLQMRNSITGRTDVDFLISPVKNSDGIFYDSRNYEAQENAILPKNADANGAYNIARKVLWAIGQFKKAEDEKLDKVKIAISNKEWLEYAQTSVKHAPAPAPAPAMVSKGEELFTGVVPILVELDGDVNGHKFSVSGEGEGDATYGKLTLKFICTTGKLPVPWPTLVTTLTYGVQCFSRYPDHMKQHDFFKSAMPEGYVQERTIFFKDDGNYKTRAEVKFEGDTLVNRIELKGIDFKEDGNILGHKLEYNYNSHNVYIMADKQKNGIKVNFKIRHNIEDGSVQLADHYQQNTPIGDGPVLLPDNHYLSTQSALSKDPNEKRDHMVLLEFVTAAGITLGMDELYK

SEQ ID NO: 183 - protein, 1478 aa, synthetic construct
  REGION 1..1478: note = SYNTHETIC
MSKLEKFTNCYSLSKTLRFKAIPVGKTQENIDNKRLLVEDEKRAEDYKGVKKLLDRYYLSFINDVLHSIKLKNLNNYISLFRKKTRTEKENKELENLEINLRKEIAKAFKGNEGYKSLFKKDIIETILPEFLDDKDEIALVNSFNGFTTAFTGFFDNRENMFSEEAKSTSIAFRCINENLTRYISNMDIFEKVDAIFDKHEVQEIKEKILNSDYDVEDFFEGEFFNFVLTQEGIDVYNAIIGGFVTESGEKIKGLNEYINLYNQKTKQKLPKFKPLYKQVLSDRESLSFYGEGYTSDEEVLEVFRNTLNKNSEIFSSIKKLEKLFKNFDEYSSAGIFVKNGPAISTISKDIFGEWNVIRDKWNAEYDDIHLKKKAVVTEKYEDDRRKSFKKIGSFSLEQLQEYADADLSVVEKLKEIIIQKVDEIYKVYGSSEKLFDADFVLEKSLKKNDAVVAIMKDLLDSVKSFENYIKAFFGEGKETNRDESFYGDFVLAYDILLKVDHIYDAIRNYVTQKPYSKDKFKLYFQNPQFMGGWDKDKETDYRATILRYGSKYYLAIMDKKYAKCLQKIDKDDVNGNYEKINYKLLPGPNKMLPKVFFSKKWMAYYNPSEDIQKIYKNGTFKKGDMFNLNDCHKLIDFFKDSISRYPKWSNAYDFNFSETEKYKDIAGFYREVEEQGYKVSFESASKKEVDKLVEEGKLYMFQIYNKDFSDKSHGTPNLHTMYFKLLFDENNHGQIRLSGGAELFMRRASLKKEELVVHPANSPIANKNPDNPKKTTTLSYDVYKDKRFSEDQYELHIPIAINKCPKNIFKINTEVRVLLKHDDNPYVIGIDRGERNLLYIVVVDGKGNIVEQYSLNEIINNFNGIRIKTDYHSLLDKKEKERFEARQNWTSIENIKELKAGYISQVVHKICELVEKYDAVIALEDLNSGFKNSRVKVEKQVYQKFEKMLIDKLNYMVDKKSNPCATGGALKGYQITNKFESFKSMSTQNGFIFYIPAWLTSKIDPSTGFVNLLKTKYTSIADSKKFISSFDRIMYVPEEDLFEFALDYKNFSRTDADYIKKWKLYSYGNRIRIFRNPKKNNVFDWEEVCLTSAYKELFNKYGINYQQGDIRALLCEQSDKAFYSSFMALMSLMLQMRNSITGRTDVDFLISPVKNSDGIFYDSRNYEAQENAILPKNADANGAYNIARKVLWAIGQFKKAEDEKLDKVKIAISNKEWLEYAQTSVKHAPAPAPAPAPAMVSKGEELFTGVVPILVELDGDVNGHKFSVSGEGEGDATYGKLTLKFICTTGKLPVPWPTLVTTLTYGVQCFSRYPDHMKQHDFFKSAMPEGYVQERTIFFKDDGNYKTRAEVKFEGDTLVNRIELKGIDFKEDGNILGHKLEYNYNSHNVYIMADKQKNGIKVNFKIRHNIEDGSVQLADHYQQNTPIGDGPVLLPDNHYLSTQSALSKDPNEKRDHMVLLEFVTAAGITLGMDELYK

SEQ ID NO: 184 - protein, 1480 aa, synthetic construct
  REGION 1..1480: note = SYNTHETIC
MSKLEKFTNCYSLSKTLRFKAIPVGKTQENIDNKRLLVEDEKRAEDYKGVKKLLDRYYLSFINDVLHSIKLKNLNNYISLFRKKTRTEKENKELENLEINLRKEIAKAFKGNEGYKSLFKKDIIETILPEFLDDKDEIALVNSFNGFTTAFTGFFDNRENMFSEEAKSTSIAFRCINENLTRYISNMDIFEKVDAIFDKHEVQEIKEKILNSDYDVEDFFEGEFFNFVLTQEGIDVYNAIIGGFVTESGEKIKGLNEYINLYNQKTKQKLPKFKPLYKQVLSDRESLSFYGEGYTSDEEVLEVFRNTLNKNSEIFSSIKKLEKLFKNFDEYSSAGIFVKNGPAISTISKDIFGEWNVIRDKWNAEYDDIHLKKKAVVTEKYEDDRRKSFKKIGSFSLEQLQEYADADLSVVEKLKEIIIQKVDEIYKVYGSSEKLFDADFVLEKSLKKNDAVVAIMKDLLDSVKSFENYIKAFFGEGKETNRDESFYGDFVLAYDILLKVDHIYDAIRNYVTQKPYSKDKFKLYFQNPQFMGGWDKDKETDYRATILRYGSKYYLAIMDKKYAKCLQKIDKDDVNGNYEKINYKLLPGPNKMLPKVFFSKKWMAYYNPSEDIQKIYKNGTFKKGDMFNLNDCHKLIDFFKDSISRYPKWSNAYDFNFSETEKYKDIAGFYREVEEQGYKVSFESASKKEVDKLVEEGKLYMFQIYNKDFSDKSHGTPNLHTMYFKLLFDENNHGQIRLSGGAELFMRRASLKKEELVVHPANSPIANKNPDNPKKTTTLSYDVYKDKRFSEDQYELHIPIAINKCPKNIFKINTEVRVLLKHDDNPYVIGIDRGERNLLYIVVVDGKGNIVEQYSLNEIINNFNGIRIKTDYHSLLDKKEKERFEARQNWTSIENIKELKAGYISQVVHKICELVEKYDAVIALEDLNSGFKNSRVKVEKQVYQKFEKMLIDKLNYMVDKKSNPCATGGALKGYQITNKFESFKSMSTQNGFIFYIPAWLTSKIDPSTGFVNLLKTKYTSIADSKKFISSFDRIMYVPEEDLFEFALDYKNFSRTDADYIKKWKLYSYGNRIRIFRNPKKNNVFDWEEVCLTSAYKELFNKYGINYQQGDIRALLCEQSDKAFYSSFMALMSLMLQMRNSITGRTDVDFLISPVKNSDGIFYDSRNYEAQENAILPKNADANGAYNIARKVLWAIGQFKKAEDEKLDKVKIAISNKEWLEYAQTSVKHAPAPAPAPAPAPAMVSKGEELFTGVVPILVELDGDVNGHKFSVSGEGEGDATYGKLTLKFICTTGKLPVPWPTLVTTLTYGVQCFSRYPDHMKQHDFFKSAMPEGYVQERTIFFKDDGNYKTRAEVKFEGDTLVNRIELKGIDFKEDGNILGHKLEYNYNSHNVYIMADKQKNGIKVNFKIRHNIEDGSVQLADHYQQNTPIGDGPVLLPDNHYLSTQSALSKDPNEKRDHMVLLEFVTAAGITLGMDELYK

SEQ ID NO: 185 - protein, 1482 aa, synthetic construct
  REGION 1..1482: note = SYNTHETIC
MSKLEKFTNCYSLSKTLRFKAIPVGKTQENIDNKRLLVEDEKRAEDYKGVKKLLDRYYLSFINDVLHSIKLKNLNNYISLFRKKTRTEKENKELENLEINLRKEIAKAFKGNEGYKSLFKKDIIETILPEFLDDKDEIALVNSFNGFTTAFTGFFDNRENMFSEEAKSTSIAFRCINENLTRYISNMDIFEKVDAIFDKHEVQEIKEKILNSDYDVEDFFEGEFFNFVLTQEGIDVYNAIIGGFVTESGEKIKGLNEYINLYNQKTKQKLPKFKPLYKQVLSDRESLSFYGEGYTSDEEVLEVFRNTLNKNSEIFSSIKKLEKLFKNFDEYSSAGIFVKNGPAISTISKDIFGEWNVIRDKWNAEYDDIHLKKKAVVTEKYEDDRRKSFKKIGSFSLEQLQEYADADLSVVEKLKEIIIQKVDEIYKVYGSSEKLFDADFVLEKSLKKNDAVVAIMKDLLDSVKSFENYIKAFFGEGKETNRDESFYGDFVLAYDILLKVDHIYDAIRNYVTQKPYSKDKFKLYFQNPQFMGGWDKDKETDYRATILRYGSKYYLAIMDKKYAKCLQKIDKDDVNGNYEKINYKLLPGPNKMLPKVFFSKKWMAYYNPSEDIQKIYKNGTFKKGDMFNLNDCHKLIDFFKDSISRYPKWSNAYDFNFSETEKYKDIAGFYREVEEQGYKVSFESASKKEVDKLVEEGKLYMFQIYNKDFSDKSHGTPNLHTMYFKLLFDENNHGQIRLSGGAELFMRRASLKKEELVVHPANSPIANKNPDNPKKTTTLSYDVYKDKRFSEDQYELHIPIAINKCPKNIFKINTEVRVLLKHDDNPYVIGIDRGERNLLYIVVVDGKGNIVEQYSLNEIINNFNGIRIKTDYHSLLDKKEKERFEARQNWTSIENIKELKAGYISQVVHKICELVEKYDAVIALEDLNSGFKNSRVKVEKQVYQKFEKMLIDKLNYMVDKKSNPCATGGALKGYQITNKFESFKSMSTQNGFIFYIPAWLTSKIDPSTGFVNLLKTKYTSIADSKKFISSFDRIMYVPEEDLFEFALDYKNFSRTDADYIKKWKLYSYGNRIRIFRNPKKNNVFDWEEVCLTSAYKELFNKYGINYQQGDIRALLCEQSDKAFYSSFMALMSLMLQMRNSITGRTDVDFLISPVKNSDGIFYDSRNYEAQENAILPKNADANGAYNIARKVLWAIGQFKKAEDEKLDKVKIAISNKEWLEYAQTSVKHAPAPAPAPAPAPAPAMVSKGEELFTGVVPILVELDGDVNGHKFSVSGEGEGDATYGKLTLKFICTTGKLPVPWPTLVTTLTYGVQCFSRYPDHMKQHDFFKSAMPEGYVQERTIFFKDDGNYKTRAEVKFEGDTLVNRIELKGIDFKEDGNILGHKLEYNYNSHNVYIMADKQKNGIKVNFKIRHNIEDGSVQLADHYQQNTPIGDGPVLLPDNHYLSTQSALSKDPNEKRDHMVLLEFVTAAGITLGMDELYK

SEQ ID NO: 186 - protein, 1484 aa, synthetic construct
  REGION 1..1484: note = SYNTHETIC
MSKLEKFTNCYSLSKTLRFKAIPVGKTQENIDNKRLLVEDEKRAEDYKGVKKLLDRYYLSFINDVLHSIKLKNLNNYISLFRKKTRTEKENKELENLEINLRKEIAKAFKGNEGYKSLFKKDIIETILPEFLDDKDEIALVNSFNGFTTAFTGFFDNRENMFSEEAKSTSIAFRCINENLTRYISNMDIFEKVDAIFDKHEVQEIKEKILNSDYDVEDFFEGEFFNFVLTQEGIDVYNAIIGGFVTESGEKIKGLNEYINLYNQKTKQKLPKFKPLYKQVLSDRESLSFYGEGYTSDEEVLEVFRNTLNKNSEIFSSIKKLEKLFKNFDEYSSAGIFVKNGPAISTISKDIFGEWNVIRDKWNAEYDDIHLKKKAVVTEKYEDDRRKSFKKIGSFSLEQLQEYADADLSVVEKLKEIIIQKVDEIYKVYGSSEKLFDADFVLEKSLKKNDAVVAIMKDLLDSVKSFENYIKAFFGEGKETNRDESFYGDFVLAYDILLKVDHIYDAIRNYVTQKPYSKDKFKLYFQNPQFMGGWDKDKETDYRATILRYGSKYYLAIMDKKYAKCLQKIDKDDVNGNYEKINYKLLPGPNKMLPKVFFSKKWMAYYNPSEDIQKIYKNGTFKKGDMFNLNDCHKLIDFFKDSISRYPKWSNAYDFNFSETEKYKDIAGFYREVEEQGYKVSFESASKKEVDKLVEEGKLYMFQIYNKDFSDKSHGTPNLHTMYFKLLFDENNHGQIRLSGGAELFMRRASLKKEELVVHPANSPIANKNPDNPKKTTTLSYDVYKDKRFSEDQYELHIPIAINKCPKNIFKINTEVRVLLKHDDNPYVIGIDRGERNLLYIVVVDGKGNIVEQYSLNEIINNFNGIRIKTDYHSLLDKKEKERFEARQNWTSIENIKELKAGYISQVVHKICELVEKYDAVIALEDLNSGFKNSRVKVEKQVYQKFEKMLIDKLNYMVDKKSNPCATGGALKGYQITNKFESFKSMSTQNGFIFYIPAWLTSKIDPSTGFVNLLKTKYTSIADSKKFISSFDRIMYVPEEDLFEFALDYKNFSRTDADYIKKWKLYSYGNRIRIFRNPKKNNVFDWEEVCLTSAYKELFNKYGINYQQGDIRALLCEQSDKAFYSSFMALMSLMLQMRNSITGRTDVDFLISPVKNSDGIFYDSRNYEAQENAILPKNADANGAYNIARKVLWAIGQFKKAEDEKLDKVKIAISNKEWLEYAQTSVKHAPAPAPAPAPAPAPAPAMVSKGEELFTGVVPILVELDGDVNGHKFSVSGEGEGDATYGKLTLKFICTTGKLPVPWPTLVTTLTYGVQCFSRYPDHMKQHDFFKSAMPEGYVQERTIFFKDDGNYKTRAEVKFEGDTLVNRIELKGIDFKEDGNILGHKLEYNYNSHNVYIMADKQKNGIKVNFKIRHNIEDGSVQLADHYQQNTPIGDGPVLLPDNHYLSTQSALSKDPNEKRDHMVLLEFVTAAGITLGMDELYK

SEQ ID NO: 187 - protein, 1486 aa, synthetic construct
  REGION 1..1486: note = SYNTHETIC
MSKLEKFTNCYSLSKTLRFKAIPVGKTQENIDNKRLLVEDEKRAEDYKGVKKLLDRYYLSFINDVLHSIKLKNLNNYISLFRKKTRTEKENKELENLEINLRKEIAKAFKGNEGYKSLFKKDIIETILPEFLDDKDEIALVNSFNGFTTAFTGFFDNRENMFSEEAKSTSIAFRCINENLTRYISNMDIFEKVDAIFDKHEVQEIKEKILNSDYDVEDFFEGEFFNFVLTQEGIDVYNAIIGGFVTESGEKIKGLNEYINLYNQKTKQKLPKFKPLYKQVLSDRESLSFYGEGYTSDEEVLEVFRNTLNKNSEIFSSIKKLEKLFKNFDEYSSAGIFVKNGPAISTISKDIFGEWNVIRDKWNAEYDDIHLKKKAVVTEKYEDDRRKSFKKIGSFSLEQLQEYADADLSVVEKLKEIIIQKVDEIYKVYGSSEKLFDADFVLEKSLKKNDAVVAIMKDLLDSVKSFENYIKAFFGEGKETNRDESFYGDFVLAYDILLKVDHIYDAIRNYVTQKPYSKDKFKLYFQNPQFMGGWDKDKETDYRATILRYGSKYYLAIMDKKYAKCLQKIDKDDVNGNYEKINYKLLPGPNKMLPKVFFSKKWMAYYNPSEDIQKIYKNGTFKKGDMFNLNDCHKLIDFFKDSISRYPKWSNAYDFNFSETEKYKDIAGFYREVEEQGYKVSFESASKKEVDKLVEEGKLYMFQIYNKDFSDKSHGTPNLHTMYFKLLFDENNHGQIRLSGGAELFMRRASLKKEELVVHPANSPIANKNPDNPKKTTTLSYDVYKDKRFSEDQYELHIPIAINKCPKNIFKINTEVRVLLKHDDNPYVIGIDRGERNLLYIVVVDGKGNIVEQYSLNEIINNFNGIRIKTDYHSLLDKKEKERFEARQNWTSIENIKELKAGYISQVVHKICELVEKYDAVIALEDLNSGFKNSRVKVEKQVYQKFEKMLIDKLNYMVDKKSNPCATGGALKGYQITNKFESFKSMSTQNGFIFYIPAWLTSKIDPSTGFVNLLKTKYTSIADSKKFISSFDRIMYVPEEDLFEFALDYKNFSRTDADYIKKWKLYSYGNRIRIFRNPKKNNVFDWEEVCLTSAYKELFNKYGINYQQGDIRALLCEQSDKAFYSSFMALMSLMLQMRNSITGRTDVDFLISPVKNSDGIFYDSRNYEAQENAILPKNADANGAYNIARKVLWAIGQFKKAEDEKLDKVKIAISNKEWLEYAQTSVKHAPAPAPAPAPAPAPAPAPAMVSKGEELFTGVVPILVELDGDVNGHKFSVSGEGEGDATYGKLTLKFICTTGKLPVPWPTLVTTLTYGVQCFSRYPDHMKQHDFFKSAMPEGYVQERTIFFKDDGNYKTRAEVKFEGDTLVNRIELKGIDFKEDGNILGHKLEYNYNSHNVYIMADKQKNGIKVNFKIRHNIEDGSVQLADHYQQNTPIGDGPVLLPDNHYLSTQSALSKDPNEKRDHMVLLEFVTAAGITLGMDELYK

SEQ ID NO: 188 - protein, 1565 aa, synthetic construct
  REGION 1..1565: note = SYNTHETIC
MTQFEGFTNLYQVSKTLRFELIPQGKTLKHIQEQGFIEEDKARNDHYKELKPIIDRIYKTYADQCLQLVQLDWENLSMSKLEKFTNCYSLSKTLRFKAIPVGKTQENIDNKRLLVEDEKRAEDYKGVKKLLDRYYLSFINDVLHSIKLKNLNNYISLFRKKTRTEKENKELENLEINLRKEIAKAFKGNEGYKSLFKKDIIETILPEFLDDKDEIALVNSFNGFTTAFTGFFDNRENMFSEEAKSTSIAFRCINENLTRYISNMDIFEKVDAIFDKHEVQEIKEKILNSDYDVEDFFEGEFFNFVLTQEGIDVYNAIIGGFVTESGEKIKGLNEYINLYNQKTKQKLPKFKPLYKQVLSDRESLSFYGEGYTSDEEVLEVFRNTLNKNSEIFSSIKKLEKLFKNFDEYSSAGIFVKNGPAISTISKDIFGEWNVIRDKWNAEYDDIHLKKKAVVTEKYEDDRRKSFKKIGSFSLEQLQEYADADLSVVEKLKEIIIQKVDEIYKVYGSSEKLFDADFVLEKSLKKNDAVVAIMKDLLDSVKSFENYIKAFFGEGKETNRDESFYGDFVLAYDILLKVDHIYDAIRNYVTQKPYSKDKFKLYFQNPQFMGGWDKDKETDYRATILRYGSKYYLAIMDKKYAKCLQKIDKDDVNGNYEKINYKLLPGPNKMLPKVFFSKKWMAYYNPSEDIQKIYKNGTFKKGDMFNLNDCHKLIDFFKDSISRYPKWSNAYDFNFSETEKYKDIAGFYREVEEQGYKVSFESASKKEVDKLVEEGKLYMFQIYNKDFSDKSHGTPNLHTMYFKLLFDENNHGQIRLSGGAELFMRRASLKKEELVVHPANSPIANKNPDNPKKTTTLSYDVYKDKRFSEDQYELHIPIAINKCPKNIFKINTEVRVLLKHDDNPYVIGIDRGERNLLYIVVVDGKGNIVEQYSLNEIINNFNGIRIKTDYHSLLDKKEKERFEARQNWTSIENIKELKAGYISQVVHKICELVEKYDAVIALEDLNSGFKNSRVKVEKQVYQKFEKMLIDKLNYMVDKKSNPCATGGALKGYQITNKFESFKSMSTQNGFIFYIPAWLTSKIDPSTGFVNLLKTKYTSIADSKKFISSFDRIMYVPEEDLFEFALDYKNFSRTDADYIKKWKLYSYGNRIRIFRNPKKNNVFDWEEVCLTSAYKELFNKYGINYQQGDIRALLCEQSDKAFYSSFMALMSLMLQMRNSITGRTDVDFLISPVKNSDGIFYDSRNYEAQENAILPKNADANGAYNIARKVLWAIGQFKKAEDEKLDKVKIAISNKEWLEYAQTSVKHAPAPAPAPAPAPAPAPAPAPAMVSKGEELFTGVVPILVELDGDVNGHKFSVSGEGEGDATYGKLTLKFICTTGKLPVPWPTLVTTLTYGVQCFSRYPDHMKQHDFFKSAMPEGYVQERTIFFKDDGNYKTRAEVKFEGDTLVNRIELKGIDFKEDGNILGHKLEYNYNSHNVYIMADKQKNGIKVNFKIRHNIEDGSVQLADHYQQNTPIGDGPVLLPDNHYLSTQSALSKDPNEKRDHMVLLEFVTAAGITLGMDELYK

SEQ ID NO: 189 - protein, 1490 aa, synthetic construct
  REGION 1..1490: note = SYNTHETIC
MSKLEKFTNCYSLSKTLRFKAIPVGKTQENIDNKRLLVEDEKRAEDYKGVKKLLDRYYLSFINDVLHSIKLKNLNNYISLFRKKTRTEKENKELENLEINLRKEIAKAFKGNEGYKSLFKKDIIETILPEFLDDKDEIALVNSFNGFTTAFTGFFDNRENMFSEEAKSTSIAFRCINENLTRYISNMDIFEKVDAIFDKHEVQEIKEKILNSDYDVEDFFEGEFFNFVLTQEGIDVYNAIIGGFVTESGEKIKGLNEYINLYNQKTKQKLPKFKPLYKQVLSDRESLSFYGEGYTSDEEVLEVFRNTLNKNSEIFSSIKKLEKLFKNFDEYSSAGIFVKNGPAISTISKDIFGEWNVIRDKWNAEYDDIHLKKKAVVTEKYEDDRRKSFKKIGSFSLEQLQEYADADLSVVEKLKEIIIQKVDEIYKVYGSSEKLFDADFVLEKSLKKNDAVVAIMKDLLDSVKSFENYIKAFFGEGKETNRDESFYGDFVLAYDILLKVDHIYDAIRNYVTQKPYSKDKFKLYFQNPQFMGGWDKDKETDYRATILRYGSKYYLAIMDKKYAKCLQKIDKDDVNGNYEKINYKLLPGPNKMLPKVFFSKKWMAYYNPSEDIQKIYKNGTFKKGDMFNLNDCHKLIDFFKDSISRYPKWSNAYDFNFSETEKYKDIAGFYREVEEQGYKVSFESASKKEVDKLVEEGKLYMFQIYNKDFSDKSHGTPNLHTMYFKLLFDENNHGQIRLSGGAELFMRRASLKKEELVVHPANSPIANKNPDNPKKTTTLSYDVYKDKRFSEDQYELHIPIAINKCPKNIFKINTEVRVLLKHDDNPYVIGIDRGERNLLYIVVVDGKGNIVEQYSLNEIINNFNGIRIKTDYHSLLDKKEKERFEARQNWTSIENIKELKAGYISQVVHKICELVEKYDAVIALEDLNSGFKNSRVKVEKQVYQKFEKMLIDKLNYMVDKKSNPCATGGALKGYQITNKFESFKSMSTQNGFIFYIPAWLTSKIDPSTGFVNLLKTKYTSIADSKKFISSFDRIMYVPEEDLFEFALDYKNFSRTDADYIKKWKLYSYGNRIRIFRNPKKNNVFDWEEVCLTSAYKELFNKYGINYQQGDIRALLCEQSDKAFYSSFMALMSLMLQMRNSITGRTDVDFLISPVKNSDGIFYDSRNYEAQENAILPKNADANGAYNIARKVLWAIGQFKKAEDEKLDKVKIAISNKEWLEYAQTSVKHAPAPAPAPAPAPAPAPAPAPAPAMVSKGEELFTGVVPILVELDGDVNGHKFSVSGEGEGDATYGKLTLKFICTTGKLPVPWPTLVTTLTYGVQCFSRYPDHMKQHDFFKSAMPEGYVQERTIFFKDDGNYKTRAEVKFEGDTLVNRIELKGIDFKEDGNILGHKLEYNYNSHNVYIMADKQKNGIKVNFKIRHNIEDGSVQLADHYQQNTPIGDGPVLLPDNHYLSTQSALSKDPNEKRDHMVLLEFVTAAGITLGMDELYK

SEQ ID NO: 190 - protein, 1492 aa, synthetic construct
  REGION 1..1492: note = SYNTHETIC
MSKLEKFTNCYSLSKTLRFKAIPVGKTQENIDNKRLLVEDEKRAEDYKGVKKLLDRYYLSFINDVLHSIKLKNLNNYISLFRKKTRTEKENKELENLEINLRKEIAKAFKGNEGYKSLFKKDIIETILPEFLDDKDEIALVNSFNGFTTAFTGFFDNRENMFSEEAKSTSIAFRCINENLTRYISNMDIFEKVDAIFDKHEVQEIKEKILNSDYDVEDFFEGEFFNFVLTQEGIDVYNAIIGGFVTESGEKIKGLNEYINLYNQKTKQKLPKFKPLYKQVLSDRESLSFYGEGYTSDEEVLEVFRNTLNKNSEIFSSIKKLEKLFKNFDEYSSAGIFVKNGPAISTISKDIFGEWNVIRDKWNAEYDDIHLKKKAVVTEKYEDDRRKSFKKIGSFSLEQLQEYADADLSVVEKLKEIIIQKVDEIYKVYGSSEKLFDADFVLEKSLKKNDAVVAIMKDLLDSVKSFENYIKAFFGEGKETNRDESFYGDFVLAYDILLKVDHIYDAIRNYVTQKPYSKDKFKLYFQNPQFMGGWDKDKETDYRATILRYGSKYYLAIMDKKYAKCLQKIDKDDVNGNYEKINYKLLPGPNKMLPKVFFSKKWMAYYNPSEDIQKIYKNGTFKKGDMFNLNDCHKLIDFFKDSISRYPKWSNAYDFNFSETEKYKDIAGFYREVEEQGYKVSFESASKKEVDKLVEEGKLYMFQIYNKDFSDKSHGTPNLHTMYFKLLFDENNHGQIRLSGGAELFMRRASLKKEELVVHPANSPIANKNPDNPKKTTTLSYDVYKDKRFSEDQYELHIPIAINKCPKNIFKINTEVRVLLKHDDNPYVIGIDRGERNLLYIVVVDGKGNIVEQYSLNEIINNFNGIRIKTDYHSLLDKKEKERFEARQNWTSIENIKELKAGYISQVVHKICELVEKYDAVIALEDLNSGFKNSRVKVEKQVYQKFEKMLIDKLNYMVDKKSNPCATGGALKGYQITNKFESFKSMSTQNGFIFYIPAWLTSKIDPSTGFVNLLKTKYTSIADSKKFISSFDRIMYVPEEDLFEFALDYKNFSRTDADYIKKWKLYSYGNRIRIFRNPKKNNVFDWEEVCLTSAYKELFNKYGINYQQGDIRALLCEQSDKAFYSSFMALMSLMLQMRNSITGRTDVDFLISPVKNSDGIFYDSRNYEAQENAILPKNADANGAYNIARKVLWAIGQFKKAEDEKLDKVKIAISNKEWLEYAQTSVKHAPAPAPAPAPAPAPAPAPAPAPAPAMVSKGEELFTGVVPILVELDGDVNGHKFSVSGEGEGDATYGKLTLKFICTTGKLPVPWPTLVTTLTYGVQCFSRYPDHMKQHDFFKSAMPEGYVQERTIFFKDDGNYKTRAEVKFEGDTLVNRIELKGIDFKEDGNILGHKLEYNYNSHNVYIMADKQKNGIKVNFKIRHNIEDGSVQLADHYQQNTPIGDGPVLLPDNHYLSTQSALSKDPNEKRDHMVLLEFVTAAGITLGMDELYK

SEQ ID NO: 191 - protein, 1494 aa, synthetic construct
  REGION 1..1494: note = SYNTHETIC
MSKLEKFTNCYSLSKTLRFKAIPVGKTQENIDNKRLLVEDEKRAEDYKGVKKLLDRYYLSFINDVLHSIKLKNLNNYISLFRKKTRTEKENKELENLEINLRKEIAKAFKGNEGYKSLFKKDIIETILPEFLDDKDEIALVNSFNGFTTAFTGFFDNRENMFSEEAKSTSIAFRCINENLTRYISNMDIFEKVDAIFDKHEVQEIKEKILNSDYDVEDFFEGEFFNFVLTQEGIDVYNAIIGGFVTESGEKIKGLNEYINLYNQKTKQKLPKFKPLYKQVLSDRESLSFYGEGYTSDEEVLEVFRNTLNKNSEIFSSIKKLEKLFKNFDEYSSAGIFVKNGPAISTISKDIFGEWNVIRDKWNAEYDDIHLKKKAVVTEKYEDDRRKSFKKIGSFSLEQLQEYADADLSVVEKLKEIIIQKVDEIYKVYGSSEKLFDADFVLEKSLKKNDAVVAIMKDLLDSVKSFENYIKAFFGEGKETNRDESFYGDFVLAYDILLKVDHIYDAIRNYVTQKPYSKDKFKLYFQNPQFMGGWDKDKETDYRATILRYGSKYYLAIMDKKYAKCLQKIDKDDVNGNYEKINYKLLPGPNKMLPKVFFSKKWMAYYNPSEDIQKIYKNGTFKKGDMFNLNDCHKLIDFFKDSISRYPKWSNAYDFNFSETEKYKDIAGFYREVEEQGYKVSFESASKKEVDKLVEEGKLYMFQIYNKDFSDKSHGTPNLHTMYFKLLFDENNHGQIRLSGGAELFMRRASLKKEELVVHPANSPIANKNPDNPKKTTTLSYDVYKDKRFSEDQYELHIPIAINKCPKNIFKINTEVRVLLKHDDNPYVIGIDRGERNLLYIVVVDGKGNIVEQYSLNEIINNFNGIRIKTDYHSLLDKKEKERFEARQNWTSIENIKELKAGYISQVVHKICELVEKYDAVIALEDLNSGFKNSRVKVEKQVYQKFEKMLIDKLNYMVDKKSNPCATGGALKGYQITNKFESFKSMSTQNGFIFYIPAWLTSKIDPSTGFVNLLKTKYTSIADSKKFISSFDRIMYVPEEDLFEFALDYKNFSRTDADYIKKWKLYSYGNRIRIFRNPKKNNVFDWEEVCLTSAYKELFNKYGINYQQGDIRALLCEQSDKAFYSSFMALMSLMLQMRNSITGRTDVDFLISPVKNSDGIFYDSRNYEAQENAILPKNADANGAYNIARKVLWAIGQFKKAEDEKLDKVKIAISNKEWLEYAQTSVKHAPAPAPAPAPAPAPAPAPAPAPAPAPAMVSKGEELFTGVVPILVELDGDVNGHKFSVSGEGEGDATYGKLTLKFICTTGKLPVPWPTLVTTLTYGVQCFSRYPDHMKQHDFFKSAMPEGYVQERTIFFKDDGNYKTRAEVKFEGDTLVNRIELKGIDFKEDGNILGHKLEYNYNSHNVYIMADKQKNGIKVNFKIRHNIEDGSVQLADHYQQNTPIGDGPVLLPDNHYLSTQSALSKDPNEKRDHMVLLEFVTAAGITLGMDELYK

SEQ ID NO: 192 - protein, 1496 aa, synthetic construct
  REGION 1..1496: note = SYNTHETIC
MSKLEKFTNCYSLSKTLRFKAIPVGKTQENIDNKRLLVEDEKRAEDYKGVKKLLDRYYLSFINDVLHSIKLKNLNNYISLFRKKTRTEKENKELENLEINLRKEIAKAFKGNEGYKSLFKKDIIETILPEFLDDKDEIALVNSFNGFTTAFTGFFDNRENMFSEEAKSTSIAFRCINENLTRYISNMDIFEKVDAIFDKHEVQEIKEKILNSDYDVEDFFEGEFFNFVLTQEGIDVYNAIIGGFVTESGEKIKGLNEYINLYNQKTKQKLPKFKPLYKQVLSDRESLSFYGEGYTSDEEVLEVFRNTLNKNSEIFSSIKKLEKLFKNFDEYSSAGIFVKNGPAISTISKDIFGEWNVIRDKWNAEYDDIHLKKKAVVTEKYEDDRRKSFKKIGSFSLEQLQEYADADLSVVEKLKEIIIQKVDEIYKVYGSSEKLFDADFVLEKSLKKNDAVVAIMKDLLDSVKSFENYIKAFFGEGKETNRDESFYGDFVLAYDILLKVDHIYDAIRNYVTQKPYSKDKFKLYFQNPQFMGGWDKDKETDYRATILRYGSKYYLAIMDKKYAKCLQKIDKDDVNGNYEKINYKLLPGPNKMLPKVFFSKKWMAYYNPSEDIQKIYKNGTFKKGDMFNLNDCHKLIDFFKDSISRYPKWSNAYDFNFSETEKYKDIAGFYREVEEQGYKVSFESASKKEVDKLVEEGKLYMFQIYNKDFSDKSHGTPNLHTMYFKLLFDENNHGQIRLSGGAELFMRRASLKKEELVVHPANSPIANKNPDNPKKTTTLSYDVYKDKRFSEDQYELHIPIAINKCPKNIFKINTEVRVLLKHDDNPYVIGIDRGERNLLYIVVVDGKGNIVEQYSLNEIINNFNGIRIKTDYHSLLDKKEKERFEARQNWTSIENIKELKAGYISQVVHKICELVEKYDAVIALEDLNSGFKNSRVKVEKQVYQKFEKMLIDKLNYMVDKKSNPCATGGALKGYQITNKFESFKSMSTQNGFIFYIPAWLTSKIDPSTGFVNLLKTKYTSIADSKKFISSFDRIMYVPEEDLFEFALDYKNFSRTDADYIKKWKLYSYGNRIRIFRNPKKNNVFDWEEVCLTSAYKELFNKYGINYQQGDIRALLCEQSDKAFYSSFMALMSLMLQMRNSITGRTDVDFLISPVKNSDGIFYDSRNYEAQENAILPKNADANGAYNIARKVLWAIGQFKKAEDEKLDKVKIAISNKEWLEYAQTSVKHAPAPAPAPAPAPAPAPAPAPAPAPAPAPAMVSKGEELFTGVVPILVELDGDVNGHKFSVSGEGEGDATYGKLTLKFICTTGKLPVPWPTLVTTLTYGVQCFSRYPDHMKQHDFFKSAMPEGYVQERTIFFKDDGNYKTRAEVKFEGDTLVNRIELKGIDFKEDGNILGHKLEYNYNSHNVYIMADKQKNGIKVNFKIRHNIEDGSVQLADHYQQNTPIGDGPVLLPDNHYLSTQSALSKDPNEKRDHMVLLEFVTAAGITLGMDELYK

SEQ ID NO: 193 - protein, 1469 aa, synthetic construct
  REGION 1..1469: note = SYNTHETIC
  VARIANT 1229: note = X can be any naturally occurring amino acid
MSKLEKFTNCYSLSKTLRFKAIPVGKTQENIDNKRLLVEDEKRAEDYKGVKKLLDRYYLSFINDVLHSIKLKNLNNYISLFRKKTRTEKENKELENLEINLRKEIAKAFKGNEGYKSLFKKDIIETILPEFLDDKDEIALVNSFNGFTTAFTGFFDNRENMFSEEAKSTSIAFRCINENLTRYISNMDIFEKVDAIFDKHEVQEIKEKILNSDYDVEDFFEGEFFNFVLTQEGIDVYNAIIGGFVTESGEKIKGLNEYINLYNQKTKQKLPKFKPLYKQVLSDRESLSFYGEGYTSDEEVLEVFRNTLNKNSEIFSSIKKLEKLFKNFDEYSSAGIFVKNGPAISTISKDIFGEWNVIRDKWNAEYDDIHLKKKAVVTEKYEDDRRKSFKKIGSFSLEQLQEYADADLSVVEKLKEIIIQKVDEIYKVYGSSEKLFDADFVLEKSLKKNDAVVAIMKDLLDSVKSFENYIKAFFGEGKETNRDESFYGDFVLAYDILLKVDHIYDAIRNYVTQKPYSKDKFKLYFQNPQFMGGWDKDKETDYRATILRYGSKYYLAIMDKKYAKCLQKIDKDDVNGNYEKINYKLLPGPNKMLPKVFFSKKWMAYYNPSEDIQKIYKNGTFKKGDMFNLNDCHKLIDFFKDSISRYPKWSNAYDFNFSETEKYKDIAGFYREVEEQGYKVSFESASKKEVDKLVEEGKLYMFQIYNKDFSDKSHGTPNLHTMYFKLLFDENNHGQIRLSGGAELFMRRASLKKEELVVHPANSPIANKNPDNPKKTTTLSYDVYKDKRFSEDQYELHIPIAINKCPKNIFKINTEVRVLLKHDDNPYVIGIDRGERNLLYIVVVDGKGNIVEQYSLNEIINNFNGIRIKTDYHSLLDKKEKERFEARQNWTSIENIKELKAGYISQVVHKICELVEKYDAVIALEDLNSGFKNSRVKVEKQVYQKFEKMLIDKLNYMVDKKSNPCATGGALKGYQITNKFESFKSMSTQNGFIFYIPAWLTSKIDPSTGFVNLLKTKYTSIADSKKFISSFDRIMYVPEEDLFEFALDYKNFSRTDADYIKKWKLYSYGNRIRIFRNPKKNNVFDWEEVCLTSAYKELFNKYGINYQQGDIRALLCEQSDKAFYSSFMALMSLMLQMRNSITGRTDVDFLISPVKNSDGIFYDSRNYEAQENAILPKNADANGAYNIARKVLWAIGQFKKAEDEKLDKVKIAISNKEWLEYAQTSVKHXPMVSKGEELFTGVVPILVELDGDVNGHKFSVSGEGEGDATYGKLTLKFICTTGKLPVPWPTLVTTLTYGVQCFSRYPDHMKQHDFFKSAMPEGYVQERTIFFKDDGNYKTRAEVKFEGDTLVNRIELKGIDFKEDGNILGHKLEYNYNSHNVYIMADKQKNGIKVNFKIRHNIEDGSVQLADHYQQNTPIGDGPVLLPDNHYLSTQSALSKDPNEKRDHMVLLEFVTAAGITLGMDELYK

SEQ ID NO: 194 - protein, 1471 aa, synthetic construct
  REGION 1..1471: note = SYNTHETIC
  VARIANT 1229: note = X can be any naturally occurring amino acid
  VARIANT 1231: note = X can be any naturally occurring amino acid
MSKLEKFTNCYSLSKTLRFKAIPVGKTQENIDNKRLLVEDEKRAEDYKGVKKLLDRYYLSFINDVLHSIKLKNLNNYISLFRKKTRTEKENKELENLEINLRKEIAKAFKGNEGYKSLFKKDIIETILPEFLDDKDEIALVNSFNGFTTAFTGFFDNRENMFSEEAKSTSIAFRCINENLTRYISNMDIFEKVDAIFDKHEVQEIKEKILNSDYDVEDFFEGEFFNFVLTQEGIDVYNAIIGGFVTESGEKIKGLNEYINLYNQKTKQKLPKFKPLYKQVLSDRESLSFYGEGYTSDEEVLEVFRNTLNKNSEIFSSIKKLEKLFKNFDEYSSAGIFVKNGPAISTISKDIFGEWNVIRDKWNAEYDDIHLKKKAVVTEKYEDDRRKSFKKIGSFSLEQLQEYADADLSVVEKLKEIIIQKVDEIYKVYGSSEKLFDADFVLEKSLKKNDAVVAIMKDLLDSVKSFENYIKAFFGEGKETNRDESFYGDFVLAYDILLKVDHIYDAIRNYVTQKPYSKDKFKLYFQNPQFMGGWDKDKETDYRATILRYGSKYYLAIMDKKYAKCLQKIDKDDVNGNYEKINYKLLPGPNKMLPKVFFSKKWMAYYNPSEDIQKIYKNGTFKKGDMFNLNDCHKLIDFFKDSISRYPKWSNAYDFNFSETEKYKDIAGFYREVEEQGYKVSFESASKKEVDKLVEEGKLYMFQIYNKDFSDKSHGTPNLHTMYFKLLFDENNHGQIRLSGGAELFMRRASLKKEELVVHPANSPIANKNPDNPKKTTTLSYDVYKDKRFSEDQYELHIPIAINKCPKNIFKINTEVRVLLKHDDNPYVIGIDRGERNLLYIVVVDGKGNIVEQYSLNEIINNFNGIRIKTDYHSLLDKKEKERFEARQNWTSIENIKELKAGYISQVVHKICELVEKYDAVIALEDLNSGFKNSRVKVEKQVYQKFEKMLIDKLNYMVDKKSNPCATGGALKGYQITNKFESFKSMSTQNGFIFYIPAWLTSKIDPSTGFVNLLKTKYTSIADSKKFISSFDRIMYVPEEDLFEFALDYKNFSRTDADYIKKWKLYSYGNRIRIFRNPKKNNVFDWEEVCLTSAYKELFNKYGINYQQGDIRALLCEQSDKAFYSSFMALMSLMLQMRNSITGRTDVDFLISPVKNSDGIFYDSRNYEAQENAILPKNADANGAYNIARKVLWAIGQFKKAEDEKLDKVKIAISNKEWLEYAQTSVKHXPXPMVSKGEELFTGVVPILVELDGDVNGHKFSVSGEGEGDATYGKLTLKFICTTGKLPVPWPTLVTTLTYGVQCFSRYPDHMKQHDFFKSAMPEGYVQERTIFFKDDGNYKTRAEVKFEGDTLVNRIELKGIDFKEDGNILGHKLEYNYNSHNVYIMADKQKNGIKVNFKIRHNIEDGSVQLADHYQQNTPIGDGPVLLPDNHYLSTQSALSKDPNEKRDHMVLLEFVTAAGITLGMDELYK

SEQ ID NO: 195 - protein, 1473 aa, synthetic construct
  REGION 1..1473: note = SYNTHETIC
  VARIANT 1229: note = X can be any naturally occurring amino acid
  VARIANT 1231: note = X can be any naturally occurring amino acid
  VARIANT 1233: note = X can be any naturally occurring amino acid
MSKLEKFTNCYSLSKTLRFKAIPVGKTQENIDNKRLLVEDEKRAEDYKGVKKLLDRYYLSFINDVLHSIKLKNLNNYISLFRKKTRTEKENKELENLEINLRKEIAKAFKGNEGYKSLFKKDIIETILPEFLDDKDEIALVNSFNGFTTAFTGFFDNRENMFSEEAKSTSIAFRCINENLTRYISNMDIFEKVDAIFDKHEVQEIKEKILNSDYDVEDFFEGEFFNFVLTQEGIDVYNAIIGGFVTESGEKIKGLNEYINLYNQKTKQKLPKFKPLYKQVLSDRESLSFYGEGYTSDEEVLEVFRNTLNKNSEIFSSIKKLEKLFKNFDEYSSAGIFVKNGPAISTISKDIFGEWNVIRDKWNAEYDDIHLKKKAVVTEKYEDDRRKSFKKIGSFSLEQLQEYADADLSVVEKLKEIIIQKVDEIYKVYGSSEKLFDADFVLEKSLKKNDAVVAIMKDLLDSVKSFENYIKAFFGEGKETNRDESFYGDFVLAYDILLKVDHIYDAIRNYVTQKPYSKDKFKLYFQNPQFMGGWDKDKETDYRATILRYGSKYYLAIMDKKYAKCLQKIDKDDVNGNYEKINYKLLPGPNKMLPKVFFSKKWMAYYNPSEDIQKIYKNGTFKKGDMFNLNDCHKLIDFFKDSISRYPKWSNAYDFNFSETEKYKDIAGFYREVEEQGYKVSFESASKKEVDKLVEEGKLYMFQIYNKDFSDKSHGTPNLHTMYFKLLFDENNHGQIRLSGGAELFMRRASLKKEELVVHPANSPIANKNPDNPKKTTTLSYDVYKDKRFSEDQYELHIPIAINKCPKNIFKINTEVRVLLKHDDNPYVIGIDRGERNLLYIVVVDGKGNIVEQYSLNEIINNFNGIRIKTDYHSLLDKKEKERFEARQNWTSIENIKELKAGYISQVVHKICELVEKYDAVIALEDLNSGFKNSRVKVEKQVYQKFEKMLIDKLNYMVDKKSNPCATGGALKGYQITNKFESFKSMSTQNGFIFYIPAWLTSKIDPSTGFVNLLKTKYTSIADSKKFISSFDRIMYVPEEDLFEFALDYKNFSRTDADYIKKWKLYSYGNRIRIFRNPKKNNVFDWEEVCLTSAYKELFNKYGINYQQGDIRALLCEQSDKAFYSSFMALMSLMLQMRNSITGRTDVDFLISPVKNSDGIFYDSRNYEAQENAILPKNADANGAYNIARKVLWAIGQFKKAEDEKLDKVKIAISNKEWLEYAQTSVKHXPXPXPMVSKGEELFTGVVPILVELDGDVNGHKFSVSGEGEGDATYGKLTLKFICTTGKLPVPWPTLVTTLTYGVQCFSRYPDHMKQHDFFKSAMPEGYVQERTIFFKDDGNYKTRAEVKFEGDTLVNRIELKGIDFKEDGNILGHKLEYNYNSHNVYIMADKQKNGIKVNFKIRHNIEDGSVQLADHYQQNTPIGDGPVLLPDNHYLSTQSALSKDPNEKRDHMVLLEFVTAAGITLGMDELYK

SEQ ID NO: 196 - protein, 1475 aa, synthetic construct
  REGION 1..1475: note = SYNTHETIC
  VARIANT 1229: note = X can be any naturally occurring amino acid
  VARIANT 1231: note = X can be any naturally occurring amino acid
  VARIANT 1233: note = X can be any naturally occurring amino acid
  VARIANT 1235: note = X can be any naturally occurring amino acid
MSKLEKFTNCYSLSKTLRFKAIPVGKTQENIDNKRLLVEDEKRAEDYKGVKKLLDRYYLSFINDVLHSIKLKNLNNYISLFRKKTRTEKENKELENLEINLRKEIAKAFKGNEGYKSLFKKDIIETILPEFLDDKDEIALVNSFNGFTTAFTGFFDNRENMFSEEAKSTSIAFRCINENLTRYISNMDIFEKVDAIFDKHEVQEIKEKILNSDYDVEDFFEGEFFNFVLTQEGIDVYNAIIGGFVTESGEKIKGLNEYINLYNQKTKQKLPKFKPLYKQVLSDRESLSFYGEGYTSDEEVLEVFRNTLNKNSEIFSSIKKLEKLFKNFDEYSSAGIFVKNGPAISTISKDIFGEWNVIRDKWNAEYDDIHLKKKAVVTEKYEDDRRKSFKKIGSFSLEQLQEYADADLSVVEKLKEIIIQKVDEIYKVYGSSEKLFDADFVLEKSLKKNDAVVAIMKDLLDSVKSFENYIKAFFGEGKETNRDESFYGDFVLAYDILLKVDHIYDAIRNYVTQKPYSKDKFKLYFQNPQFMGGWDKDKETDYRATILRYGSKYYLAIMDKKYAKCLQKIDKDDVNGNYEKINYKLLPGPNKMLPKVFFSKKWMAYYNPSEDIQKIYKNGTFKKGDMFNLNDCHKLIDFFKDSISRYPKWSNAYDFNFSETEKYKDIAGFYREVEEQGYKVSFESASKKEVDKLVEEGKLYMFQIYNKDFSDKSHGTPNLHTMYFKLLFDENNHGQIRLSGGAELFMRRASLKKEELVVHPANSPIANKNPDNPKKTTTLSYDVYKDKRFSEDQYELHIPIAINKCPKNIFKINTEVRVLLKHDDNPYVIGIDRGERNLLYIVVVDGKGNIVEQYSLNEIINNFNGIRIKTDYHSLLDKKEKERFEARQNWTSIENIKELKAGYISQVVHKICELVEKYDAVIALEDLNSGFKNSRVKVEKQVYQKFEKMLIDKLNYMVDKKSNPCATGGALKGYQITNKFESFKSMSTQNGFIFYIPAWLTSKIDPSTGFVNLLKTKYTSIADSKKFISSFDRIMYVPEEDLFEFALDYKNFSRTDADYIKKWKLYSYGNRIRIFRNPKKNNVFDWEEVCLTSAYKELFNKYGINYQQGDIRALLCEQSDKAFYSSFMALMSLMLQMRNSITGRTDVDFLISPVKNSDGIFYDSRNYEAQENAILPKNADANGAYNIARKVLWAIGQFKKAEDEKLDKVKIAISNKEWLEYAQTSVKHXPXPXPXPMVSKGEELFTGVVPILVELDGDVNGHKFSVSGEGEGDATYGKLTLKFICTTGKLPVPWPTLVTTLTYGVQCFSRYPDHMKQHDFFKSAMPEGYVQERTIFFKDDGNYKTRAEVKFEGDTLVNRIELKGIDFKEDGNILGHKLEYNYNSHNVYIMADKQKNGIKVNFKIRHNIEDGSVQLADHYQQNTPIGDGPVLLPDNHYLSTQSALSKDPNEKRDHMVLLEFVTAAGITLGMDELYK

SEQ ID NO: 197 - protein, 1477 aa, synthetic construct
  REGION 1..1477: note = SYNTHETIC
  VARIANT 1229: note = X can be any naturally occurring amino acid
  VARIANT 1231: note = X can be any naturally occurring amino acid
  VARIANT 1233: note = X can be any naturally occurring amino acid
  VARIANT 1235: note = X can be any naturally occurring amino acid
  VARIANT 1237: note = X can be any naturally occurring amino acid
MSKLEKFTNCYSLSKTLRFKAIPVGKTQENIDNKRLLVEDEKRAEDYKGVKKLLDRYYLSFINDVLHSIKLKNLNNYISLFRKKTRTEKENKELENLEINLRKEIAKAFKGNEGYKSLFKKDIIETILPEFLDDKDEIALVNSFNGFTTAFTGFFDNRENMFSEEAKSTSIAFRCINENLTRYISNMDIFEKVDAIFDKHEVQEIKEKILNSDYDVEDFFEGEFFNFVLTQEGIDVYNAIIGGFVTESGEKIKGLNEYINLYNQKTKQKLPKFKPLYKQVLSDRESLSFYGEGYTSDEEVLEVFRNTLNKNSEIFSSIKKLEKLFKNFDEYSSAGIFVKNGPAISTISKDIFGEWNVIRDKWNAEYDDIHLKKKAVVTEKYEDDRRKSFKKIGSFSLEQLQEYADADLSVVEKLKEIIIQKVDEIYKVYGSSEKLFDADFVLEKSLKKNDAVVAIMKDLLDSVKSFENYIKAFFGEGKETNRDESFYGDFVLAYDILLKVDHIYDAIRNYVTQKPYSKDKFKLYFQNPQFMGGWDKDKETDYRATILRYGSKYYLAIMDKKYAKCLQKIDKDDVNGNYEKINYKLLPGPNKMLPKVFFSKKWMAYYNPSEDIQKIYKNGTFKKGDMFNLNDCHKLIDFFKDSISRYPKWSNAYDFNFSETEKYKDIAGFYREVEEQGYKVSFESASKKEVDKLVEEGKLYMFQIYNKDFSDKSHGTPNLHTMYFKLLFDENNHGQIRLSGGAELFMRRASLKKEELVVHPANSPIANKNPDNPKKTTTLSYDVYKDKRFSEDQYELHIPIAINKCPKNIFKINTEVRVLLKHDDNPYVIGIDRGERNLLYIVVVDGKGNIVEQYSLNEIINNFNGIRIKTDYHSLLDKKEKERFEARQNWTSIENIKELKAGYISQVVHKICELVEKYDAVIALEDLNSGFKNSRVKVEKQVYQKFEKMLIDKLNYMVDKKSNPCATGGALKGYQITNKFESFKSMSTQNGFIFYIPAWLTSKIDPSTGFVNLLKTKYTSIADSKKFISSFDRIMYVPEEDLFEFALDYKNFSRTDADYIKKWKLYSYGNRIRIFRNPKKNNVFDWEEVCLTSAYKELFNKYGINYQQGDIRALLCEQSDKAFYSSFMALMSLMLQMRNSITGRTDVDFLISPVKNSDGIFYDSRNYEAQENAILPKNADANGAYNIARKVLWAIGQFKKAEDEKLDKVKIAISNKEWLEYAQTSVKHXPXPXPXPXPMVSKGEELFTGVVPILVELDGDVNGHKFSVSGEGEGDATYGKLTLKFICTTGKLPVPWPTLVTTLTYGVQCFSRYPDHMKQHDFFKSAMPEGYVQERTIFFKDDGNYKTRAEVKFEGDTLVNRIELKGIDFKEDGNILGHKLEYNYNSHNVYIMADKQKNGIKVNFKIRHNIEDGSVQLADHYQQNTPIGDGPVLLPDNHYLSTQSALSKDPNEKRDHMVLLEFVTAAGITLGMDELYK

SEQ ID NO: 198 - protein, 1479 aa, synthetic construct
  REGION 1..1479: note = SYNTHETIC
  VARIANT 1229: note = X can be any naturally occurring amino acid
  VARIANT 1231: note = X can be any naturally occurring amino acid
  VARIANT 1233: note = X can be any naturally occurring amino acid
  VARIANT 1235: note = X can be any naturally occurring amino acid
  VARIANT 1237: note = X can be any naturally occurring amino acid
  VARIANT 1239: note = X can be any naturally occurring amino acid
MSKLEKFTNCYSLSKTLRFKAIPVGKTQENIDNKRLLVEDEKRAEDYKGVKKLLDRYYLSFINDVLHSIKLKNLNNYISLFRKKTRTEKENKELENLEINLRKEIAKAFKGNEGYKSLFKKDIIETILPEFLDDKDEIALVNSFNGFTTAFTGFFDNRENMFSEEAKSTSIAFRCINENLTRYISNMDIFEKVDAIFDKHEVQEIKEKILNSDYDVEDFFEGEFFNFVLTQEGIDVYNAIIGGFVTESGEKIKGLNEYINLYNQKTKQKLPKFKPLYKQVLSDRESLSFYGEGYTSDEEVLEVFRNTLNKNSEIFSSIKKLEKLFKNFDEYSSAGIFVKNGPAISTISKDIFGEWNVIRDKWNAEYDDIHLKKKAVVTEKYEDDRRKSFKKIGSFSLEQLQEYADADLSVVEKLKEIIIQKVDEIYKVYGSSEKLFDADFVLEKSLKKNDAVVAIMKDLLDSVKSFENYIKAFFGEGKETNRDESFYGDFVLAYDILLKVDHIYDAIRNYVTQKPYSKDKFKLYFQNPQFMGGWDKDKETDYRATILRYGSKYYLAIMDKKYAKCLQKIDKDDVNGNYEKINYKLLPGPNKMLPKVFFSKKWMAYYNPSEDIQKIYKNGTFKKGDMFNLNDCHKLIDFFKDSISRYPKWSNAYDFNFSETEKYKDIAGFYREVEEQGYKVSFESASKKEVDKLVEEGKLYMFQIYNKDFSDKSHGTPNLHTMYFKLLFDENNHGQIRLSGGAELFMRRASLKKEELVVHPANSPIANKNPDNPKKTTTLSYDVYKDKRFSEDQYELHIPIAINKCPKNIFKINTEVRVLLKHDDNPYVIGIDRGERNLLYIVVVDGKGNIVEQYSLNEIINNFNGIRIKTDYHSLLDKKEKERFEARQNWTSIENIKELKAGYISQVVHKICELVEKYDAVIALEDLNSGFKNSRVKVEKQVYQKFEKMLIDKLNYMVDKKSNPCATGGALKGYQITNKFESFKSMSTQNGFIFYIPAWLTSKIDPSTGFVNLLKTKYTSIADSKKFISSFDRIMYVPEEDLFEFALDYKNFSRTDADYIKKWKLYSYGNRIRIFRNPKKNNVFDWEEVCLTSAYKELFNKYGINYQQGDIRALLCEQSDKAFYSSFMALMSLMLQMRNSITGRTDVDFLISPVKNSDGIFYDSRNYEAQENAILPKNADANGAYNIARKVLWAIGQFKKAEDEKLDKVKIAISNKEWLEYAQTSVKHXPXPXPXPXPXPMVSKGEELFTGVVPILVELDGDVNGHKFSVSGEGEGDATYGKLTLKFICTTGKLPVPWPTLVTTLTYGVQCFSRYPDHMKQHDFFKSAMPEGYVQERTIFFKDDGNYKTRAEVKFEGDTLVNRIELKGIDFKEDGNILGHKLEYNYNSHNVYIMADKQKNGIKVNFKIRHNIEDGSVQLADHYQQNTPIGDGPVLLPDNHYLSTQSALSKDPNEKRDHMVLLEFVTAAGITLGMDELYK

SEQ ID NO: 199 - protein, 1481 aa, synthetic construct
  REGION 1..1481: note = SYNTHETIC
  VARIANT 1229: note = X can be any naturally occurring amino acid
  VARIANT 1231: note = X can be any naturally occurring amino acid
  VARIANT 1233: note = X can be any naturally occurring amino acid
  VARIANT 1235: note = X can be any naturally occurring amino acid
  VARIANT 1237: note = X can be any naturally occurring amino acid
  VARIANT 1239: note = X can be any naturally occurring amino acid
  VARIANT 1241: note = X can be any naturally occurring amino acid
MSKLEKFTNCYSLSKTLRFKAIPVGKTQENIDNKRLLVEDEKRAEDYKGVKKLLDRYYLSFINDVLHSIKLKNLNNYISLFRKKTRTEKENKELENLEINLRKEIAKAFKGNEGYKSLFKKDIIETILPEFLDDKDEIALVNSFNGFTTAFTGFFDNRENMFSEEAKSTSIAFRCINENLTRYISNMDIFEKVDAIFDKHEVQEIKEKILNSDYDVEDFFEGEFFNFVLTQEGIDVYNAIIGGFVTESGEKIKGLNEYINLYNQKTKQKLPKFKPLYKQVLSDRESLSFYGEGYTSDEEVLEVFRNTLNKNSEIFSSIKKLEKLFKNFDEYSSAGIFVKNGPAISTISKDIFGEWNVIRDKWNAEYDDIHLKKKAVVTEKYEDDRRKSFKKIGSFSLEQLQEYADADLSVVEKLKEIIIQKVDEIYKVYGSSEKLFDADFVLEKSLKKNDAVVAIMKDLLDSVKSFENYIKAFFGEGKETNRDESFYGDFVLAYDILLKVDHIYDAIRNYVTQKPYSKDKFKLYFQNPQFMGGWDKDKETDYRATILRYGSKYYLAIMDKKYAKCLQKIDKDDVNGNYEKINYKLLPGPNKMLPKVFFSKKWMAYYNPSEDIQKIYKNGTFKKGDMFNLNDCHKLIDFFKDSISRYPKWSNAYDFNFSETEKYKDIAGFYREVEEQGYKVSFESASKKEVDKLVEEGKLYMFQIYNKDFSDKSHGTPNLHTMYFKLLFDENNHGQIRLSGGAELFMRRASLKKEELVVHPANSPIANKNPDNPKKTTTLSYDVYKDKRFSEDQYELHIPIAINKCPKNIFKINTEVRVLLKHDDNPYVIGIDRGERNLLYIVVVDGKGNIVEQYSLNEIINNFNGIRIKTDYHSLLDKKEKERFEARQNWTSIENIKELKAGYISQVVHKICELVEKYDAVIALEDLNSGFKNSRVKVEKQVYQKFEKMLIDKLNYMVDKKSNPCATGGALKGYQITNKFESFKSMSTQNGFIFYIPAWLTSKIDPSTGFVNLLKTKYTSIADSKKFISSFDRIMYVPEEDLFEFALDYKNFSRTDADYIKKWKLYSYGNRIRIFRNPKKNNVFDWEEVCLTSAYKELFNKYGINYQQGDIRALLCEQSDKAFYSSFMALMSLMLQMRNSITGRTDVDFLISPVKNSDGIFYDSRNYEAQENAILPKNADANGAYNIARKVLWAIGQFKKAEDEKLDKVKIAISNKEWLEYAQTSVKHXPXPXPXPXPXPXPMVSKGEELFTGVVPILVELDGDVNGHKFSVSGEGEGDATYGKLTLKFICTTGKLPVPWPTLVTTLTYGVQCFSRYPDHMKQHDFFKSAMPEGYVQERTIFFKDDGNYKTRAEVKFEGDTLVNRIELKGIDFKEDGNILGHKLEYNYNSHNVYIMADKQKNGIKVNFKIRHNIEDGSVQLADHYQQNTPIGDGPVLLPDNHYLSTQSALSKDPNEKRDHMVLLEFVTAAGITLGMDELYK

SEQ ID NO: 200 - protein, 1483 aa, synthetic construct
  REGION 1..1483: note = SYNTHETIC
  VARIANT 1229: note = X can be any naturally occurring amino acid
  VARIANT 1231: note = X can be any naturally occurring amino acid
  VARIANT 1233: note = X can be any naturally occurring amino acid
  VARIANT 1235: note = X can be any naturally occurring amino acid
  VARIANT 1237: note = X can be any naturally occurring amino acid
  VARIANT 1239: note = X can be any naturally occurring amino acid
  VARIANT 1241: note = X can be any naturally occurring amino acid
  VARIANT 1243: note = X can be any naturally occurring amino acid
MSKLEKFTNCYSLSKTLRFKAIPVGKTQENIDNKRLLVEDEKRAEDYKGVKKLLDRYYLSFINDVLHSIKLKNLNNYISLFRKKTRTEKENKELENLEINLRKEIAKAFKGNEGYKSLFKKDIIETILPEFLDDKDEIALVNSFNGFTTAFTGFFDNRENMFSEEAKSTSIAFRCINENLTRYISNMDIFEKVDAIFDKHEVQEIKEKILNSDYDVEDFFEGEFFNFVLTQEGIDVYNAIIGGFVTESGEKIKGLNEYINLYNQKTKQKLPKFKPLYKQVLSDRESLSFYGEGYTSDEEVLEVFRNTLNKNSEIFSSIKKLEKLFKNFDEYSSAGIFVKNGPAISTISKDIFGEWNVIRDKWNAEYDDIHLKKKAVVTEKYEDDRRKSFKKIGSFSLEQLQEYADADLSVVEKLKEIIIQKVDEIYKVYGSSEKLFDADFVLEKSLKKNDAVVAIMKDLLDSVKSFENYIKAFFGEGKETNRDESFYGDFVLAYDILLKVDHIYDAIRNYVTQKPYSKDKFKLYFQNPQFMGGWDKDKETDYRATILRYGSKYYLAIMDKKYAKCLQKIDKDDVNGNYEKINYKLLPGPNKMLPKVFFSKKWMAYYNPSEDIQKIYKNGTFKKGDMFNLNDCHKLIDFFKDSISRYPKWSNAYDFNFSETEKYKDIAGFYREVEEQGYKVSFESASKKEVDKLVEEGKLYMFQIYNKDFSDKSHGTPNLHTMYFKLLFDENNHGQIRLSGGAELFMRRASLKKEELVVHPANSPIANKNPDNPKKTTTLSYDVYKDKRFSEDQYELHIPIAINKCPKNIFKINTEVRVLLKHDDNPYVIGIDRGERNLLYIVVVDGKGNIVEQYSLNEIINNFNGIRIKTDYHSLLDKKEKERFEARQNWTSIENIKELKAGYISQVVHKICELVEKYDAVIALEDLNSGFKNSRVKVEKQVYQKFEKMLIDKLNYMVDKKSNPCATGGALKGYQITNKFESFKSMSTQNGFIFYIPAWLTSKIDPSTGFVNLLKTKYTSIADSKKFISSFDRIMYVPEEDLFEFALDYKNFSRTDADYIKKWKLYSYGNRIRIFRNPKKNNVFDWEEVCLTSAYKELFNKYGINYQQGDIRALLCEQSDKAFYSSFMALMSLMLQMRNSITGRTDVDFLISPVKNSDGIFYDSRNYEAQENAILPKNADANGAYNIARKVLWAIGQFKKAEDEKLDKVKIAISNKEWLEYAQTSVKHXPXPXPXPXPXPXPXPMVSKGEELFTGVVPILVELDGDVNGHKFSVSGEGEGDATYGKLTLKFICTTGKLPVPWPTLVTTLTYGVQCFSRYPDHMKQHDFFKSAMPEGYVQERTIFFKDDGNYKTRAEVKFEGDTLVNRIELKGIDFKEDGNILGHKLEYNYNSHNVYIMADKQKNGIKVNFKIRHNIEDGSVQLADHYQQNTPIGDGPVLLPDNHYLSTQSALSKDPNEKRDHMVLLEFVTAAGITLGMDELYK

SEQ ID NO: 201 - protein, 1485 aa, synthetic construct
  REGION 1..1485: note = SYNTHETIC
  VARIANT 1229: note = X can be any naturally occurring amino acid
  VARIANT 1231: note = X can be any naturally occurring amino acid
  VARIANT 1233: note = X can be any naturally occurring amino acid
  VARIANT 1235: note = X can be any naturally occurring amino acid
  VARIANT 1237: note = X can be any naturally occurring amino acid
  VARIANT 1239: note = X can be any naturally occurring amino acid
  VARIANT 1241: note = X can be any naturally occurring amino acid
  VARIANT 1243: note = X can be any naturally occurring amino acid
  VARIANT 1245: note = X can be any naturally occurring amino acid
MSKLEKFTNCYSLSKTLRFKAIPVGKTQENIDNKRLLVEDEKRAEDYKGVKKLLDRYYLSFINDVLHSIKLKNLNNYISLFRKKTRTEKENKELENLEINLRKEIAKAFKGNEGYKSLFKKDIIETILPEFLDDKDEIALVNSFNGFTTAFTGFFDNRENMFSEEAKSTSIAFRCINENLTRYISNMDIFEKVDAIFDKHEVQEIKEKILNSDYDVEDFFEGEFFNFVLTQEGIDVYNAIIGGFVTESGEKIKGLNEYINLYNQKTKQKLPKFKPLYKQVLSDRESLSFYGEGYTSDEEVLEVFRNTLNKNSEIFSSIKKLEKLFKNFDEYSSAGIFVKNGPAISTISKDIFGEWNVIRDKWNAEYDDIHLKKKAVVTEKYEDDRRKSFKKIGSFSLEQLQEYADADLSVVEKLKEIIIQKVDEIYKVYGSSEKLFDADFVLEKSLKKNDAVVAIMKDLLDSVKSFENYIKAFFGEGKETNRDESFYGDFVLAYDILLKVDHIYDAIRNYVTQKPYSKDKFKLYFQNPQFMGGWDKDKETDYRATILRYGSKYYLAIMDKKYAKCLQKIDKDDVNGNYEKINYKLLPGPNKMLPKVFFSKKWMAYYNPSEDIQKIYKNGTFKKGDMFNLNDCHKLIDFFKDSISRYPKWSNAYDFNFSETEKYKDIAGFYREVEEQGYKVSFESASKKEVDKLVEEGKLYMFQIYNKDFSDKSHGTPNLHTMYFKLLFDENNHGQIRLSGGAELFMRRASLKKEELVVHPANSPIANKNPDNPKKTTTLSYDVYKDKRFSEDQYELHIPIAINKCPKNIFKINTEVRVLLKHDDNPYVIGIDRGERNLLYIVVVDGKGNIVEQYSLNEIINNFNGIRIKTDYHSLLDKKEKERFEARQNWTSIENIKELKAGYISQVVHKICELVEKYDAVIALEDLNSGFKNSRVKVEKQVYQKFEKMLIDKLNYMVDKKSNPCATGGALKGYQITNKFESFKSMSTQNGFIFYIPAWLTSKIDPSTGFVNLLKTKYTSIADSKKFISSFDRIMYVPEEDLFEFALDYKNFSRTDADYIKKWKLYSYGNRIRIFRNPKKNNVFDWEEVCLTSAYKELFNKYGINYQQGDIRALLCEQSDKAFYSSFMALMSLMLQMRNSITGRTDVDFLISPVKNSDGIFYDSRNYEAQENAILPKNADANGAYNIARKVLWAIGQFKKAEDEKLDKVKIAISNKEWLEYAQTSVKHXPXPXPXPXPXPXPXPXPMVSKGEELFTGVVPILVELDGDVNGHKFSVSGEGEGDATYGKLTLKFICTTGKLPVPWPTLVTTLTYGVQCFSRYPDHMKQHDFFKSAMPEGYVQERTIFFKDDGNYKTRAEVKFEGDTLVNRIELKGIDFKEDGNILGHKLEYNYNSHNVYIMADKQKNGIKVNFKIRHNIEDGSVQLADHYQQNTPIGDGPVLLPDNHYLSTQSALSKDPNEKRDHMVLLEFVTAAGITLGMDELYK

SEQ ID NO: 202 - protein, 1487 aa, synthetic construct
  REGION 1..1487: note = SYNTHETIC
  VARIANT 1229: note = X can be any naturally occurring amino acid
  VARIANT 1231: note = X can be any naturally occurring amino acid
  VARIANT 1233: note = X can be any naturally occurring amino acid
  VARIANT 1235: note = X can be any naturally occurring amino acid
  VARIANT 1237: note = X can be any naturally occurring amino acid
  VARIANT 1239: note = X can be any naturally occurring amino acid
  VARIANT 1241: note = X can be any naturally occurring amino acid
  VARIANT 1243: note = X can be any naturally occurring amino acid
  VARIANT 1245: note = X can be any naturally occurring amino acid
  VARIANT 1247: note = X can be any naturally occurring amino acid
MSKLEKFTNCYSLSKTLRFKAIPVGKTQENIDNKRLLVEDEKRAEDYKGVKKLLDRYYLSFINDVLHSIKLKNLNNYISLFRKKTRTEKENKELENLEINLRKEIAKAFKGNEGYKSLFKKDIIETILPEFLDDKDEIALVNSFNGFTTAFTGFFDNRENMFSEEAKSTSIAFRCINENLTRYISNMDIFEKVDAIFDKHEVQEIKEKILNSDYDVEDFFEGEFFNFVLTQEGIDVYNAIIGGFVTESGEKIKGLNEYINLYNQKTKQKLPKFKPLYKQVLSDRESLSFYGEGYTSDEEVLEVFRNTLNKNSEIFSSIKKLEKLFKNFDEYSSAGIFVKNGPAISTISKDIFGEWNVIRDKWNAEYDDIHLKKKAVVTEKYEDDRRKSFKKIGSFSLEQLQEYADADLSVVEKLKEIIIQKVDEIYKVYGSSEKLFDADFVLEKSLKKNDAVVAIMKDLLDSVKSFENYIKAFFGEGKETNRDESFYGDFVLAYDILLKVDHIYDAIRNYVTQKPYSKDKFKLYFQNPQFMGGWDKDKETDYRATILRYGSKYYLAIMDKKYAKCLQKIDKDDVNGNYEKINYKLLPGPNKMLPKVFFSKKWMAYYNPSEDIQKIYKNGTFKKGDMFNLNDCHKLIDFFKDSISRYPKWSNAYDFNFSETEKYKDIAGFYREVEEQGYKVSFESASKKEVDKLVEEGKLYMFQIYNKDFSDKSHGTPNLHTMYFKLLFDENNHGQIRLSGGAELFMRRASLKKEELVVHPANSPIANKNPDNPKKTTTLSYDVYKDKRFSEDQYELHIPIAINKCPKNIFKINTEVRVLLKHDDNPYVIGIDRGERNLLYIVVVDGKGNIVEQYSLNEIINNFNGIRIKTDYHSLLDKKEKERFEARQNWTSIENIKELKAGYISQVVHKICELVEKYDAVIALEDLNSGFKNSRVKVEKQVYQKFEKMLIDKLNYMVDKKSNPCATGGALKGYQITNKFESFKSMSTQNGFIFYIPAWLTSKIDPSTGFVNLLKTKYTSIADSKKFISSFDRIMYVPEEDLFEFALDYKNFSRTDADYIKKWKLYSYGNRIRIFRNPKKNNVFDWEEVCLTSAYKELFNKYGINYQQGDIRALLCEQSDKAFYSSFMALMSLMLQMRNSITGRTDVDFLISPVKNSDGIFYDSRNYEAQENAILPKNADANGAYNIARKVLWAIGQFKKAEDEKLDKVKIAISNKEWLEYAQTSVKHXPXPXPXPXPXPXPXPXPXPMVSKGEELFTGVVPILVELDGDVNGHKFSVSGEGEGDATYGKLTLKFICTTGKLPVPWPTLVTTLTYGVQCFSRYPDHMKQHDFFKSAMPEGYVQERTIFFKDDGNYKTRAEVKFEGDTLVNRIELKGIDFKEDGNILGHKLEYNYNSHNVYIMADKQKNGIKVNFKIRHNIEDGSVQLADHYQQNTPIGDGPVLLPDNHYLSTQSALSKDPNEKRDHMVLLEFVTAAGITLGMDELYK

SEQ ID NO: 203 - protein, 1489 aa, synthetic construct
  REGION 1..1489: note = SYNTHETIC
  VARIANT 1229: note = X can be any naturally occurring amino acid
  VARIANT 1231: note = X can be any naturally occurring amino acid
  VARIANT 1233: note = X can be any naturally occurring amino acid
  VARIANT 1235: note = X can be any naturally occurring amino acid
  VARIANT 1237: note = X can be any naturally occurring amino acid
  VARIANT 1239: note = X can be any naturally occurring amino acid
  VARIANT 1241: note = X can be any naturally occurring amino acid
  VARIANT 1243: note = X can be any naturally occurring amino acid
  VARIANT 1245: note = X can be any naturally occurring amino acid
  VARIANT 1247: note = X can be any naturally occurring amino acid
  VARIANT 1249: note = X can be any naturally occurring amino acid
MSKLEKFTNCYSLSKTLRFKAIPVGKTQENIDNKRLLVEDEKRAEDYKGVKKLLDRYYLSFINDVLHSIKLKNLNNYISLFRKKTRTEKENKELENLEINLRKEIAKAFKGNEGYKSLFKKDIIETILPEFLDDKDEIALVNSFNGFTTAFTGFFDNRENMFSEEAKSTSIAFRCINENLTRYISNMDIFEKVDAIFDKHEVQEIKEKILNSDYDVEDFFEGEFFNFVLTQEGIDVYNAIIGGFVTESGEKIKGLNEYINLYNQKTKQKLPKFKPLYKQVLSDRESLSFYGEGYTSDEEVLEVFRNTLNKNSEIFSSIKKLEKLFKNFDEYSSAGIFVKNGPAISTISKDIFGEWNVIRDKWNAEYDDIHLKKKAVVTEKYEDDRRKSFKKIGSFSLEQLQEYADADLSVVEKLKEIIIQKVDEIYKVYGSSEKLFDADFVLEKSLKKNDAVVAIMKDLLDSVKSFENYIKAFFGEGKETNRDESFYGDFVLAYDILLKVDHIYDAIRNYVTQKPYSKDKFKLYFQNPQFMGGWDKDKETDYRATILRYGSKYYLAIMDKKYAKCLQKIDKDDVNGNYEKINYKLLPGPNKMLPKVFFSKKWMAYYNPSEDIQKIYKNGTFKKGDMFNLNDCHKLIDFFKDSISRYPKWSNAYDFNFSETEKYKDIAGFYREVEEQGYKVSFESASKKEVDKLVEEGKLYMFQIYNKDFSDKSHGTPNLHTMYFKLLFDENNHGQIRLSGGAELFMRRASLKKEELVVHPANSPIANKNPDNPKKTTTLSYDVYKDKRFSEDQYELHIPIAINKCPKNIFKINTEVRVLLKHDDNPYVIGIDRGERNLLYIVVVDGKGNIVEQYSLNEIINNFNGIRIKTDYHSLLDKKEKERFEARQNWTSIENIKELKAGYISQVVHKICELVEKYDAVIALEDLNSGFKNSRVKVEKQVYQKFEKMLIDKLNYMVDKKSNPCATGGALKGYQITNKFESFKSMSTQNGFIFYIPAWLTSKIDPSTGFVNLLKTKYTSIADSKKFISSFDRIMYVPEEDLFEFALDYKNFSRTDADYIKKWKLYSYGNRIRIFRNPKKNNVFDWEEVCLTSAYKELFNKYGINYQQGDIRALLCEQSDKAFYSSFMALMSLMLQMRNSITGRTDVDFLISPVKNSDGIFYDSRNYEAQENAILPKNADANGAYNIARKVLWAIGQFKKAEDEKLDKVKIAISNKEWLEYAQTSVKHXPXPXPXPXPXPXPXPXPXPXPMVSKGEELFTGVVPILVELDGDVNGHKFSVSGEGEGDATYGKLTLKFICTTGKLPVPWPTLVTTLTYGVQCFSRYPDHMKQHDFFKSAMPEGYVQERTIFFKDDGNYKTRAEVKFEGDTLVNRIELKGIDFKEDGNILGHKLEYNYNSHNVYIMADKQKNGIKVNFKIRHNIEDGSVQLADHYQQNTPIGDGPVLLPDNHYLSTQSALSKDPNEKRDHMVLLEFVTAAGITLGMDELYK

SEQ ID NO: 204 - protein, 1491 aa, synthetic construct
  REGION 1..1491: note = SYNTHETIC
  VARIANT 1229: note = X can be any naturally occurring amino acid
  VARIANT 1231: note = X can be any naturally occurring amino acid
  VARIANT 1233: note = X can be any naturally occurring amino acid
  VARIANT 1235: note = X can be any naturally occurring amino acid
  VARIANT 1237: note = X can be any naturally occurring amino acid
  VARIANT 1239: note = X can be any naturally occurring amino acid
  VARIANT 1241: note = X can be any naturally occurring amino acid
  VARIANT 1243: note = X can be any naturally occurring amino acid
  VARIANT 1245: note = X can be any naturally occurring amino acid
  VARIANT 1247: note = X can be any naturally occurring amino acid
  VARIANT 1249: note = X can be any naturally occurring amino acid
  VARIANT 1251: note = X can be any naturally occurring amino acid
MSKLEKFTNCYSLSKTLRFKAIPVGKTQENIDNKRLLVEDEKRAEDYKGVKKLLDRYYLSFINDVLHSIKLKNLNNYISLFRKKTRTEKENKELENLEINLRKEIAKAFKGNEGYKSLFKKDIIETILPEFLDDKDEIALVNSFNGFTTAFTGFFDNRENMFSEEAKSTSIAFRCINENLTRYISNMDIFEKVDAIFDKHEVQEIKEKILNSDYDVEDFFEGEFFNFVLTQEGIDVYNAIIGGFVTESGEKIKGLNEYINLYNQKTKQKLPKFKPLYKQVLSDRESLSFYGEGYTSDEEVLEVFRNTLNKNSEIFSSIKKLEKLFKNFDEYSSAGIFVKNGPAISTISKDIFGEWNVIRDKWNAEYDDIHLKKKAVVTEKYEDDRRKSFKKIGSFSLEQLQEYADADLSVVEKLKEIIIQKVDEIYKVYGSSEKLFDADFVLEKSLKKNDAVVAIMKDLLDSVKSFENYIKAFFGEGKETNRDESFYGDFVLAYDILLKVDHIYDAIRNYVTQKPYSKDKFKLYFQNPQFMGGWDKDKETDYRATILRYGSKYYLAIMDKKYAKCLQKIDKDDVNGNYEKINYKLLPGPNKMLPKVFFSKKWMAYYNPSEDIQKIYKNGTFKKGDMFNLNDCHKLIDFFKDSISRYPKWSNAYDFNFSETEKYKDIAGFYREVEEQGYKVSFESASKKEVDKLVEEGKLYMFQIYNKDFSDKSHGTPNLHTMYFKLLFDENNHGQIRLSGGAELFMRRASLKKEELVVHPANSPIANKNPDNPKKTTTLSYDVYKDKRFSEDQYELHIPIAINKCPKNIFKINTEVRVLLKHDDNPYVIGIDRGERNLLYIVVVDGKGNIVEQYSLNEIINNFNGIRIKTDYHSLLDKKEKERFEARQNWTSIENIKELKAGYISQVVHKICELVEKYDAVIALEDLNSGFKNSRVKVEKQVYQKFEKMLIDKLNYMVDKKSNPCATGGALKGYQITNKFESFKSMSTQNGFIFYIPAWLTSKIDPSTGFVNLLKTKYTSIADSKKFISSFDRIMYVPEEDLFEFALDYKNFSRTDADYIKKWKLYSYGNRIRIFRNPKKNNVFDWEEVCLTSAYKELFNKYGINYQQGDIRALLCEQSDKAFYSSFMALMSLMLQMRNSITGRTDVDFLISPVKNSDGIFYDSRNYEAQENAILPKNADANGAYNIARKVLWAIGQFKKAEDEKLDKVKIAISNKEWLEYAQTSVKHXPXPXPXPXPXPXPXPXPXPXPXPMVSKGEELFTGVVPILVELDGDVNGHKFSVSGEGEGDATYGKLTLKFICTTGKLPVPWPTLVTTLTYGVQCFSRYPDHMKQHDFFKSAMPEGYVQERTIFFKDDGNYKTRAEVKFEGDTLVNRIELKGIDFKEDGNILGHKLEYNYNSHNVYIMADKQKNGIKVNFKIRHNIEDGSVQLADHYQQNTPIGDGPVLLPDNHYLSTQSALSKDPNEKRDHMVLLEFVTAAGITLGMDELYK

SEQ ID NO: 205 - protein, 1493 aa, synthetic construct
  REGION 1..1493: note = SYNTHETIC
  VARIANT 1229: note = X can be any naturally occurring amino acid
  VARIANT 1231: note = X can be any naturally occurring amino acid
  VARIANT 1233: note = X can be any naturally occurring amino acid
  VARIANT 1235: note = X can be any naturally occurring amino acid
  VARIANT 1237: note = X can be any naturally occurring amino acid
  VARIANT 1239: note = X can be any naturally occurring amino acid
  VARIANT 1241: note = X can be any naturally occurring amino acid
  VARIANT 1243: note = X can be any naturally occurring amino acid
  VARIANT 1245: note = X can be any naturally occurring amino acid
  VARIANT 1247: note = X can be any naturally occurring amino acid
  VARIANT 1249: note = X can be any naturally occurring amino acid
  VARIANT 1251: note = X can be any naturally occurring amino acid
  VARIANT 1253: note = X can be any naturally occurring amino acid
MSKLEKFTNCYSLSKTLRFKAIPVGKTQENIDNKRLLVEDEKRAEDYKGVKKLLDRYYLSFINDVLHSIKLKNLNNYISLFRKKTRTEKENKELENLEINLRKEIAKAFKGNEGYKSLFKKDIIETILPEFLDDKDEIALVNSFNGFTTAFTGFFDNRENMFSEEAKSTSIAFRCINENLTRYISNMDIFEKVDAIFDKHEVQEIKEKILNSDYDVEDFFEGEFFNFVLTQEGIDVYNAIIGGFVTESGEKIKGLNEYINLYNQKTKQKLPKFKPLYKQVLSDRESLSFYGEGYTSDEEVLEVFRNTLNKNSEIFSSIKKLEKLFKNFDEYSSAGIFVKNGPAISTISKDIFGEWNVIRDKWNAEYDDIHLKKKAVVTEKYEDDRRKSFKKIGSFSLEQLQEYADADLSVVEKLKEIIIQKVDEIYKVYGSSEKLFDADFVLEKSLKKNDAVVAIMKDLLDSVKSFENYIKAFFGEGKETNRDESFYGDFVLAYDILLKVDHIYDAIRNYVTQKPYSKDKFKLYFQNPQFMGGWDKDKETDYRATILRYGSKYYLAIMDKKYAKCLQKIDKDDVNGNYEKINYKLLPGPNKMLPKVFFSKKWMAYYNPSEDIQKIYKNGTFKKGDMFNLNDCHKLIDFFKDSISRYPKWSNAYDFNFSETEKYKDIAGFYREVEEQGYKVSFESASKKEVDKLVEEGKLYMFQIYNKDFSDKSHGTPNLHTMYFKLLFDENNHGQIRLSGGAELFMRRASLKKEELVVHPANSPIANKNPDNPKKTTTLSYDVYKDKRFSEDQYELHIPIAINKCPKNIFKINTEVRVLLKHDDNPYVIGIDRGERNLLYIVVVDGKGNIVEQYSLNEIINNFNGIRIKTDYHSLLDKKEKERFEARQNWTSIENIKELKAGYISQVVHKICELVEKYDAVIALEDLNSGFKNSRVKVEKQVYQKFEKMLIDKLNYMVDKKSNPCATGGALKGYQITNKFESFKSMSTQNGFIFYIPAWLTSKIDPSTGFVNLLKTKYTSIADSKKFISSFDRIMYVPEEDLFEFALDYKNFSRTDADYIKKWKLYSYGNRIRIFRNPKKNNVFDWEEVCLTSAYKELFNKYGINYQQGDIRALLCEQSDKAFYSSFMALMSLMLQMRNSITGRTDVDFLISPVKNSDGIFYDSRNYEAQENAILPKNADANGAYNIARKVLWAIGQFKKAEDEKLDKVKIAISNKEWLEYAQTSVKHXPXPXPXPXPXPXPXPXPXPXPXPXPMVSKGEELFTGVVPILVELDGDVNGHKFSVSGEGEGDATYGKLTLKFICTTGKLPVPWPTLVTTLTYGVQCFSRYPDHMKQHDFFKSAMPEGYVQERTIFFKDDGNYKTRAEVKFEGDTLVNRIELKGIDFKEDGNILGHKLEYNYNSHNVYIMADKQKNGIKVNFKIRHNIEDGSVQLADHYQQNTPIGDGPVLLPDNHYLSTQSALSKDPNEKRDHMVLLEFVTAAGITLGMDELYK

SEQ ID NO: 206 - protein, 1495 aa, synthetic construct
  REGION 1..1495: note = SYNTHETIC
  VARIANT 1229: note = X can be any naturally occurring amino acid
  VARIANT 1231: note = X can be any naturally occurring amino acid
  VARIANT 1233: note = X can be any naturally occurring amino acid
  VARIANT 1235: note = X can be any naturally occurring amino acid
  VARIANT 1237: note = X can be any naturally occurring amino acid
  VARIANT 1239: note = X can be any naturally occurring amino acid
  VARIANT 1241: note = X can be any naturally occurring amino acid
  VARIANT 1243: note = X can be any naturally occurring amino acid
  VARIANT 1245: note = X can be any naturally occurring amino acid
  VARIANT 1247: note = X can be any naturally occurring amino acid
  VARIANT 1249: note = X can be any naturally occurring amino acid
  VARIANT 1251: note = X can be any naturally occurring amino acid
  VARIANT 1253: note = X can be any naturally occurring amino acid
  VARIANT 1255: note = X can be any naturally occurring amino acid
MSKLEKFTNCYSLSKTLRFKAIPVGKTQENIDNKRLLVEDEKRAEDYKGVKKLLDRYYLSFINDVLHSIKLKNLNNYISLFRKKTRTEKENKELENLEINLRKEIAKAFKGNEGYKSLFKKDIIETILPEFLDDKDEIALVNSFNGFTTAFTGFFDNRENMFSEEAKSTSIAFRCINENLTRYISNMDIFEKVDAIFDKHEVQEIKEKILNSDYDVEDFFEGEFFNFVLTQEGIDVYNAIIGGFVTESGEKIKGLNEYINLYNQKTKQKLPKFKPLYKQVLSDRESLSFYGEGYTSDEEVLEVFRNTLNKNSEIFSSIKKLEKLFKNFDEYSSAGIFVKNGPAISTISKDIFGEWNVIRDKWNAEYDDIHLKKKAVVTEKYEDDRRKSFKKIGSFSLEQLQEYADADLSVVEKLKEIIIQKVDEIYKVYGSSEKLFDADFVLEKSLKKNDAVVAIMKDLLDSVKSFENYIKAFFGEGKETNRDESFYGDFVLAYDILLKVDHIYDAIRNYVTQKPYSKDKFKLYFQNPQFMGGWDKDKETDYRATILRYGSKYYLAIMDKKYAKCLQKIDKDDVNGNYEKINYKLLPGPNKMLPKVFFSKKWMAYYNPSEDIQKIYKNGTFKKGDMFNLNDCHKLIDFFKDSISRYPKWSNAYDFNFSETEKYKDIAGFYREVEEQGYKVSFESASKKEVDKLVEEGKLYMFQIYNKDFSDKSHGTPNLHTMYFKLLFDENNHGQIRLSGGAELFMRRASLKKEELVVHPANSPIANKNPDNPKKTTTLSYDVYKDKRFSEDQYELHIPIAINKCPKNIFKINTEVRVLLKHDDNPYVIGIDRGERNLLYIVVVDGKGNIVEQYSLNEIINNFNGIRIKTDYHSLLDKKEKERFEARQNWTSIENIKELKAGYISQVVHKICELVEKYDAVIALEDLNSGFKNSRVKVEKQVYQKFEKMLIDKLNYMVDKKSNPCATGGALKGYQITNKFESFKSMSTQNGFIFYIPAWLTSKIDPSTGFVNLLKTKYTSIADSKKFISSFDRIMYVPEEDLFEFALDYKNFSRTDADYIKKWKLYSYGNRIRIFRNPKKNNVFDWEEVCLTSAYKELFNKYGINYQQGDIRALLCEQSDKAFYSSFMALMSLMLQMRNSITGRTDVDFLISPVKNSDGIFYDSRNYEAQENAILPKNADANGAYNIARKVLWAIGQFKKAEDEKLDKVKIAISNKEWLEYAQTSVKHXPXPXPXPXPXPXPXPXPXPXPXPXPXPMVSKGEELFTGVVPILVELDGDVNGHKFSVSGEGEGDATYGKLTLKFICTTGKLPVPWPTLVTTLTYGVQCFSRYPDHMKQHDFFKSAMPEGYVQERTIFFKDDGNYKTRAEVKFEGDTLVNRIELKGIDFKEDGNILGHKLEYNYNSHNVYIMADKQKNGIKVNFKIRHNIEDGSVQLADHYQQNTPIGDGPVLLPDNHYLSTQSALSKDPNEKRDHMVLLEFVTAAGITLGMDELYK

SEQ ID NO: 207 - protein, 1482 aa, synthetic construct
  REGION 1..1482: note = SYNTHETIC
MSKLEKFTNCYSLSKTLRFKAIPVGKTQENIDNKRLLVEDEKRAEDYKGVKKLLDRYYLSFINDVLHSIKLKNLNNYISLFRKKTRTEKENKELENLEINLRKEIAKAFKGNEGYKSLFKKDIIETILPEFLDDKDEIALVNSFNGFTTAFTGFFDNRENMFSEEAKSTSIAFRCINENLTRYISNMDIFEKVDAIFDKHEVQEIKEKILNSDYDVEDFFEGEFFNFVLTQEGIDVYNAIIGGFVTESGEKIKGLNEYINLYNQKTKQKLPKFKPLYKQVLSDRESLSFYGEGYTSDEEVLEVFRNTLNKNSEIFSSIKKLEKLFKNFDEYSSAGIFVKNGPAISTISKDIFGEWNVIRDKWNAEYDDIHLKKKAVVTEKYEDDRRKSFKKIGSFSLEQLQEYADADLSVVEKLKEIIIQKVDEIYKVYGSSEKLFDADFVLEKSLKKNDAVVAIMKDLLDSVKSFENYIKAFFGEGKETNRDESFYGDFVLAYDILLKVDHIYDAIRNYVTQKPYSKDKFKLYFQNPQFMGGWDKDKETDYRATILRYGSKYYLAIMDKKYAKCLQKIDKDDVNGNYEKINYKLLPGPNKMLPKVFFSKKWMAYYNPSEDIQKIYKNGTFKKGDMFNLNDCHKLIDFFKDSISRYPKWSNAYDFNFSETEKYKDIAGFYREVEEQGYKVSFESASKKEVDKLVEEGKLYMFQIYNKDFSDKSHGTPNLHTMYFKLLFDENNHGQIRLSGGAELFMRRASLKKEELVVHPANSPIANKNPDNPKKTTTLSYDVYKDKRFSEDQYELHIPIAINKCPKNIFKINTEVRVLLKHDDNPYVIGIDRGERNLLYIVVVDGKGNIVEQYSLNEIINNFNGIRIKTDYHSLLDKKEKERFEARQNWTSIENIKELKAGYISQVVHKICELVEKYDAVIALEDLNSGFKNSRVKVEKQVYQKFEKMLIDKLNYMVDKKSNPCATGGALKGYQITNKFESFKSMSTQNGFIFYIPAWLTSKIDPSTGFVNLLKTKYTSIADSKKFISSFDRIMYVPEEDLFEFALDYKNFSRTDADYIKKWKLYSYGNRIRIFRNPKKNNVFDWEEVCLTSAYKELFNKYGINYQQGDIRALLCEQSDKAFYSSFMALMSLMLQMRNSITGRTDVDFLISPVKNSDGIFYDSRNYEAQENAILPKNADANGAYNIARKVLWAIGQFKKAEDEKLDKVKIAISNKEWLEYAQTSVKHGGGGSEAAAKGGGGSMVSKGEELFTGVVPILVELDGDVNGHKFSVSGEGEGDATYGKLTLKFICTTGKLPVPWPTLVTTLTYGVQCFSRYPDHMKQHDFFKSAMPEGYVQERTIFFKDDGNYKTRAEVKFEGDTLVNRIELKGIDFKEDGNILGHKLEYNYNSHNVYIMADKQKNGIKVNFKIRHNIEDGSVQLADHYQQNTPIGDGPVLLPDNHYLSTQSALSKDPNEKRDHMVLLEFVTAAGITLGMDELYK

SEQ ID NO: 208 - protein, 1476 aa, synthetic construct
  REGION 1..1476: note = SYNTHETIC
MSKLEKFTNCYSLSKTLRFKAIPVGKTQENIDNKRLLVEDEKRAEDYKGVKKLLDRYYLSFINDVLHSIKLKNLNNYISLFRKKTRTEKENKELENLEINLRKEIAKAFKGNEGYKSLFKKDIIETILPEFLDDKDEIALVNSFNGFTTAFTGFFDNRENMFSEEAKSTSIAFRCINENLTRYISNMDIFEKVDAIFDKHEVQEIKEKILNSDYDVEDFFEGEFFNFVLTQEGIDVYNAIIGGFVTESGEKIKGLNEYINLYNQKTKQKLPKFKPLYKQVLSDRESLSFYGEGYTSDEEVLEVFRNTLNKNSEIFSSIKKLEKLFKNFDEYSSAGIFVKNGPAISTISKDIFGEWNVIRDKWNAEYDDIHLKKKAVVTEKYEDDRRKSFKKIGSFSLEQLQEYADADLSVVEKLKEIIIQKVDEIYKVYGSSEKLFDADFVLEKSLKKNDAVVAIMKDLLDSVKSFENYIKAFFGEGKETNRDESFYGDFVLAYDILLKVDHIYDAIRNYVTQKPYSKDKFKLYFQNPQFMGGWDKDKETDYRATILRYGSKYYLAIMDKKYAKCLQKIDKDDVNGNYEKINYKLLPGPNKMLPKVFFSKKWMAYYNPSEDIQKIYKNGTFKKGDMFNLNDCHKLIDFFKDSISRYPKWSNAYDFNFSETEKYKDIAGFYREVEEQGYKVSFESASKKEVDKLVEEGKLYMFQIYNKDFSDKSHGTPNLHTMYFKLLFDENNHGQIRLSGGAELFMRRASLKKEELVVHPANSPIANKNPDNPKKTTTLSYDVYKDKRFSEDQYELHIPIAINKCPKNIFKINTEVRVLLKHDDNPYVIGIDRGERNLLYIVVVDGKGNIVEQYSLNEIINNFNGIRIKTDYHSLLDKKEKERFEARQNWTSIENIKELKAGYISQVVHKICELVEKYDAVIALEDLNSGFKNSRVKVEKQVYQKFEKMLIDKLNYMVDKKSNPCATGGALKGYQITNKFESFKSMSTQNGFIFYIPAWLTSKIDPSTGFVNLLKTKYTSIADSKKFISSFDRIMYVPEEDLFEFALDYKNFSRTDADYIKKWKLYSYGNRIRIFRNPKKNNVFDWEEVCLTSAYKELFNKYGINYQQGDIRALLCEQSDKAFYSSFMALMSLMLQMRNSITGRTDVDFLISPVKNSDGIFYDSRNYEAQENAILPKNADANGAYNIARKVLWAIGQFKKAEDEKLDKVKIAISNKEWLEYAQTSVKHGSAGSAAGSGEFMVSKGEEDNMAIIKEFMRFKVHMEGSVNGHEFEIEGEGEGRPYEGTQTAKLKVTKGGPLPFAWDILSPQFMYGSKAYVKHPADIPDYLKLSFPEGFKWERVMNFEDGGVVTVTQDSSLQDGEFIYKVKLRGTNFPSDGPVMQKKTMGWEASSERMYPEDGALKGEIKQRLKLKDGGHYDAEVKTTYKAKKPVQLPGAYNVNIKLDITSHNEDYTIVEQYERAEGRHSTGGMDELYK

SEQ ID NO: 209 - protein, 1484 aa, synthetic construct
  REGION 1..1484: note = SYNTHETIC
MSKLEKFTNCYSLSKTLRFKAIPVGKTQENIDNKRLLVEDEKRAEDYKGVKKLLDRYYLSFINDVLHSIKLKNLNNYISLFRKKTRTEKENKELENLEINLRKEIAKAFKGNEGYKSLFKKDIIETILPEFLDDKDEIALVNSFNGFTTAFTGFFDNRENMFSEEAKSTSIAFRCINENLTRYISNMDIFEKVDAIFDKHEVQEIKEKILNSDYDVEDFFEGEFFNFVLTQEGIDVYNAIIGGFVTESGEKIKGLNEYINLYNQKTKQKLPKFKPLYKQVLSDRESLSFYGEGYTSDEEVLEVFRNTLNKNSEIFSSIKKLEKLFKNFDEYSSAGIFVKNGPAISTISKDIFGEWNVIRDKWNAEYDDIHLKKKAVVTEKYEDDRRKSFKKIGSFSLEQLQEYADADLSVVEKLKEIIIQKVDEIYKVYGSSEKLFDADFVLEKSLKKNDAVVAIMKDLLDSVKSFENYIKAFFGEGKETNRDESFYGDFVLAYDILLKVDHIYDAIRNYVTQKPYSKDKFKLYFQNPQFMGGWDKDKETDYRATILRYGSKYYLAIMDKKYAKCLQKIDKDDVNGNYEKINYKLLPGPNKMLPKVFFSKKWMAYYNPSEDIQKIYKNGTFKKGDMFNLNDCHKLIDFFKDSISRYPKWSNAYDFNFSETEKYKDIAGFYREVEEQGYKVSFESASKKEVDKLVEEGKLYMFQIYNKDFSDKSHGTPNLHTMYFKLLFDENNHGQIRLSGGAELFMRRASLKKEELVVHPANSPIANKNPDNPKKTTTLSYDVYKDKRFSEDQYELHIPIAINKCPKNIFKINTEVRVLLKHDDNPYVIGIDRGERNLLYIVVVDGKGNIVEQYSLNEIINNFNGIRIKTDYHSLLDKKEKERFEARQNWTSIENIKELKAGYISQVVHKICELVEKYDAVIALEDLNSGFKNSRVKVEKQVYQKFEKMLIDKLNYMVDKKSNPCATGGALKGYQITNKFESFKSMSTQNGFIFYIPAWLTSKIDPSTGFVNLLKTKYTSIADSKKFISSFDRIMYVPEEDLFEFALDYKNFSRTDADYIKKWKLYSYGNRIRIFRNPKKNNVFDWEEVCLTSAYKELFNKYGINYQQGDIRALLCEQSDKAFYSSFMALMSLMLQMRNSITGRTDVDFLISPVKNSDGIFYDSRNYEAQENAILPKNADANGAYNIARKVLWAIGQFKKAEDEKLDKVKIAISNKEWLEYAQTSVKHGGGGSGGGGSGGGGSGGGGSMVSKGEEDNMAIIKEFMRFKVHMEGSVNGHEFEIEGEGEGRPYEGTQTAKLKVTKGGPLPFAWDILSPQFMYGSKAYVKHPADIPDYLKLSFPEGFKWERVMNFEDGGVVTVTQDSSLQDGEFIYKVKLRGTNFPSDGPVMQKKTMGWEASSERMYPEDGALKGEIKQRLKLKDGGHYDAEVKTTYKAKKPVQLPGAYNVNIKLDITSHNEDYTIVEQYERAEGRHSTGGMDELYK

SEQ ID NO: 210 - protein, 1486 aa, synthetic construct
  REGION 1..1486: note = SYNTHETIC
MSKLEKFTNCYSLSKTLRFKAIPVGKTQENIDNKRLLVEDEKRAEDYKGVKKLLDRYYLSFINDVLHSIKLKNLNNYISLFRKKTRTEKENKELENLEINLRKEIAKAFKGNEGYKSLFKKDIIETILPEFLDDKDEIALVNSFNGFTTAFTGFFDNRENMFSEEAKSTSIAFRCINENLTRYISNMDIFEKVDAIFDKHEVQEIKEKILNSDYDVEDFFEGEFFNFVLTQEGIDVYNAIIGGFVTESGEKIKGLNEYINLYNQKTKQKLPKFKPLYKQVLSDRESLSFYGEGYTSDEEVLEVFRNTLNKNSEIFSSIKKLEKLFKNFDEYSSAGIFVKNGPAISTISKDIFGEWNVIRDKWNAEYDDIHLKKKAVVTEKYEDDRRKSFKKIGSFSLEQLQEYADADLSVVEKLKEIIIQKVDEIYKVYGSSEKLFDADFVLEKSLKKNDAVVAIMKDLLDSVKSFENYIKAFFGEGKETNRDESFYGDFVLAYDILLKVDHIYDAIRNYVTQKPYSKDKFKLYFQNPQFMGGWDKDKETDYRATILRYGSKYYLAIMDKKYAKCLQKIDKDDVNGNYEKINYKLLPGPNKMLPKVFFSKKWMAYYNPSEDIQKIYKNGTFKKGDMFNLNDCHKLIDFFKDSISRYPKWSNAYDFNFSETEKYKDIAGFYREVEEQGYKVSFESASKKEVDKLVEEGKLYMFQIYNKDFSDKSHGTPNLHTMYFKLLFDENNHGQIRLSGGAELFMRRASLKKEELVVHPANSPIANKNPDNPKKTTTLSYDVYKDKRFSEDQYELHIPIAINKCPKNIFKINTEVRVLLKHDDNPYVIGIDRGERNLLYIVVVDGKGNIVEQYSLNEIINNFNGIRIKTDYHSLLDKKEKERFEARQNWTSIENIKELKAGYISQVVHKICELVEKYDAVIALEDLNSGFKNSRVKVEKQVYQKFEKMLIDKLNYMVDKKSNPCATGGALKGYQITNKFESFKSMSTQNGFIFYIPAWLTSKIDPSTGFVNLLKTKYTSIADSKKFISSFDRIMYVPEEDLFEFALDYKNFSRTDADYIKKWKLYSYGNRIRIFRNPKKNNVFDWEEVCLTSAYKELFNKYGINYQQGDIRALLCEQSDKAFYSSFMALMSLMLQMRNSITGRTDVDFLISPVKNSDGIFYDSRNYEAQENAILPKNADANGAYNIARKVLWAIGQFKKAEDEKLDKVKIAISNKEWLEYAQTSVKHAEAAAKEAAAKEAAAKEAAAKAMVSKGEEDNMAIIKEFMRFKVHMEGSVNGHEFEIEGEGEGRPYEGTQTAKLKVTKGGPLPFAWDILSPQFMYGSKAYVKHPADIPDYLKLSFPEGFKWERVMNFEDGGVVTVTQDSSLQDGEFIYKVKLRGTNFPSDGPVMQKKTMGWEASSERMYPEDGALKGEIKQRLKLKDGGHYDAEVKTTYKAKKPVQLPGAYNVNIKLDITSHNEDYTIVEQYERAEGRHSTGGMDELYK

SEQ ID NO: 211 - protein, 1510 aa, synthetic construct
  REGION 1..1510: note = SYNTHETIC
MSKLEKFTNCYSLSKTLRFKAIPVGKTQENIDNKRLLVEDEKRAEDYKGVKKLLDRYYLSFINDVLHSIKLKNLNNYISLFRKKTRTEKENKELENLEINLRKEIAKAFKGNEGYKSLFKKDIIETILPEFLDDKDEIALVNSFNGFTTAFTGFFDNRENMFSEEAKSTSIAFRCINENLTRYISNMDIFEKVDAIFDKHEVQEIKEKILNSDYDVEDFFEGEFFNFVLTQEGIDVYNAIIGGFVTESGEKIKGLNEYINLYNQKTKQKLPKFKPLYKQVLSDRESLSFYGEGYTSDEEVLEVFRNTLNKNSEIFSSIKKLEKLFKNFDEYSSAGIFVKNGPAISTISKDIFGEWNVIRDKWNAEYDDIHLKKKAVVTEKYEDDRRKSFKKIGSFSLEQLQEYADADLSVVEKLKEIIIQKVDEIYKVYGSSEKLFDADFVLEKSLKKNDAVVAIMKDLLDSVKSFENYIKAFFGEGKETNRDESFYGDFVLAYDILLKVDHIYDAIRNYVTQKPYSKDKFKLYFQNPQFMGGWDKDKETDYRATILRYGSKYYLAIMDKKYAKCLQKIDKDDVNGNYEKINYKLLPGPNKMLPKVFFSKKWMAYYNPSEDIQKIYKNGTFKKGDMFNLNDCHKLIDFFKDSISRYPKWSNAYDFNFSETEKYKDIAGFYREVEEQGYKVSFESASKKEVDKLVEEGKLYMFQIYNKDFSDKSHGTPNLHTMYFKLLFDENNHGQIRLSGGAELFMRRASLKKEELVVHPANSPIANKNPDNPKKTTTLSYDVYKDKRFSEDQYELHIPIAINKCPKNIFKINTEVRVLLKHDDNPYVIGIDRGERNLLYIVVVDGKGNIVEQYSLNEIINNFNGIRIKTDYHSLLDKKEKERFEARQNWTSIENIKELKAGYISQVVHKICELVEKYDAVIALEDLNSGFKNSRVKVEKQVYQKFEKMLIDKLNYMVDKKSNPCATGGALKGYQITNKFESFKSMSTQNGFIFYIPAWLTSKIDPSTGFVNLLKTKYTSIADSKKFISSFDRIMYVPEEDLFEFALDYKNFSRTDADYIKKWKLYSYGNRIRIFRNPKKNNVFDWEEVCLTSAYKELFNKYGINYQQGDIRALLCEQSDKAFYSSFMALMSLMLQMRNSITGRTDVDFLISPVKNSDGIFYDSRNYEAQENAILPKNADANGAYNIARKVLWAIGQFKKAEDEKLDKVKIAISNKEWLEYAQTSVKHAEAAAKEAAAKEAAAKEAAAKALEAEAAAKEAAAKEAAAKEAAAKAMVSKGEEDNMAIIKEFMRFKVHMEGSVNGHEFEIEGEGEGRPYEGTQTAKLKVTKGGPLPFAWDILSPQFMYGSKAYVKHPADIPDYLKLSFPEGFKWERVMNFEDGGVVTVTQDSSLQDGEFIYKVKLRGTNFPSDGPVMQKKTMGWEASSERMYPEDGALKGEIKQRLKLKDGGHYDAEVKTTYKAKKPVQLPGAYNVNIKLDITSHNEDYTIVEQYERAEGRHSTGGMDELYK

SEQ ID NO: 212 - protein, 1514 aa, synthetic construct
  REGION 1..1514: note = SYNTHETIC
MSKLEKFTNCYSLSKTLRFKAIPVGKTQENIDNKRLLVEDEKRAEDYKGVKKLLDRYYLSFINDVLHSIKLKNLNNYISLFRKKTRTEKENKELENLEINLRKEIAKAFKGNEGYKSLFKKDIIETILPEFLDDKDEIALVNSFNGFTTAFTGFFDNRENMFSEEAKSTSIAFRCINENLTRYISNMDIFEKVDAIFDKHEVQEIKEKILNSDYDVEDFFEGEFFNFVLTQEGIDVYNAIIGGFVTESGEKIKGLNEYINLYNQKTKQKLPKFKPLYKQVLSDRESLSFYGEGYTSDEEVLEVFRNTLNKNSEIFSSIKKLEKLFKNFDEYSSAGIFVKNGPAISTISKDIFGEWNVIRDKWNAEYDDIHLKKKAVVTEKYEDDRRKSFKKIGSFSLEQLQEYADADLSVVEKLKEIIIQKVDEIYKVYGSSEKLFDADFVLEKSLKKNDAVVAIMKDLLDSVKSFENYIKAFFGEGKETNRDESFYGDFVLAYDILLKVDHIYDAIRNYVTQKPYSKDKFKLYFQNPQFMGGWDKDKETDYRATILRYGSKYYLAIMDKKYAKCLQKIDKDDVNGNYEKINYKLLPGPNKMLPKVFFSKKWMAYYNPSEDIQKIYKNGTFKKGDMFNLNDCHKLIDFFKDSISRYPKWSNAYDFNFSETEKYKDIAGFYREVEEQGYKVSFESASKKEVDKLVEEGKLYMFQIYNKDFSDKSHGTPNLHTMYFKLLFDENNHGQIRLSGGAELFMRRASLKKEELVVHPANSPIANKNPDNPKKTTTLSYDVYKDKRFSEDQYELHIPIAINKCPKNIFKINTEVRVLLKHDDNPYVIGIDRGERNLLYIVVVDGKGNIVEQYSLNEIINNFNGIRIKTDYHSLLDKKEKERFEARQNWTSIENIKELKAGYISQVVHKICELVEKYDAVIALEDLNSGFKNSRVKVEKQVYQKFEKMLIDKLNYMVDKKSNPCATGGALKGYQITNKFESFKSMSTQNGFIFYIPAWLTSKIDPSTGFVNLLKTKYTSIADSKKFISSFDRIMYVPEEDLFEFALDYKNFSRTDADYIKKWKLYSYGNRIRIFRNPKKNNVFDWEEVCLTSAYKELFNKYGINYQQGDIRALLCEQSDKAFYSSFMALMSLMLQMRNSITGRTDVDFLISPVKNSDGIFYDSRNYEAQENAILPKNADANGAYNIARKVLWAIGQFKKAEDEKLDKVKIAISNKEWLEYAQTSVKHLEAEAAAKEAAAKEAAAKEAAAKALEAEAAAKEAAAKEAAAKEAAAKALEMVSKGEEDNMAIIKEFMRFKVHMEGSVNGHEFEIEGEGEGRPYEGTQTAKLKVTKGGPLPFAWDILSPQFMYGSKAYVKHPADIPDYLKLSFPEGFKWERVMNFEDGGVVTVTQDSSLQDGEFIYKVKLRGTNFPSDGPVMQKKTMGWEASSERMYPEDGALKGEIKQRLKLKDGGHYDAEVKTTYKAKKPVQLPGAYNVNIKLDITSHNEDYTIVEQYERAEGRHSTGGMDELYK

SEQ ID NO: 213 - protein, 1467 aa, synthetic construct
  REGION 1..1467: note = SYNTHETIC
MSKLEKFTNCYSLSKTLRFKAIPVGKTQENIDNKRLLVEDEKRAEDYKGVKKLLDRYYLSFINDVLHSIKLKNLNNYISLFRKKTRTEKENKELENLEINLRKEIAKAFKGNEGYKSLFKKDIIETILPEFLDDKDEIALVNSFNGFTTAFTGFFDNRENMFSEEAKSTSIAFRCINENLTRYISNMDIFEKVDAIFDKHEVQEIKEKILNSDYDVEDFFEGEFFNFVLTQEGIDVYNAIIGGFVTESGEKIKGLNEYINLYNQKTKQKLPKFKPLYKQVLSDRESLSFYGEGYTSDEEVLEVFRNTLNKNSEIFSSIKKLEKLFKNFDEYSSAGIFVKNGPAISTISKDIFGEWNVIRDKWNAEYDDIHLKKKAVVTEKYEDDRRKSFKKIGSFSLEQLQEYADADLSVVEKLKEIIIQKVDEIYKVYGSSEKLFDADFVLEKSLKKNDAVVAIMKDLLDSVKSFENYIKAFFGEGKETNRDESFYGDFVLAYDILLKVDHIYDAIRNYVTQKPYSKDKFKLYFQNPQFMGGWDKDKETDYRATILRYGSKYYLAIMDKKYAKCLQKIDKDDVNGNYEKINYKLLPGPNKMLPKVFFSKKWMAYYNPSEDIQKIYKNGTFKKGDMFNLNDCHKLIDFFKDSISRYPKWSNAYDFNFSETEKYKDIAGFYREVEEQGYKVSFESASKKEVDKLVEEGKLYMFQIYNKDFSDKSHGTPNLHTMYFKLLFDENNHGQIRLSGGAELFMRRASLKKEELVVHPANSPIANKNPDNPKKTTTLSYDVYKDKRFSEDQYELHIPIAINKCPKNIFKINTEVRVLLKHDDNPYVIGIDRGERNLLYIVVVDGKGNIVEQYSLNEIINNFNGIRIKTDYHSLLDKKEKERFEARQNWTSIENIKELKAGYISQVVHKICELVEKYDAVIALEDLNSGFKNSRVKVEKQVYQKFEKMLIDKLNYMVDKKSNPCATGGALKGYQITNKFESFKSMSTQNGFIFYIPAWLTSKIDPSTGFVNLLKTKYTSIADSKKFISSFDRIMYVPEEDLFEFALDYKNFSRTDADYIKKWKLYSYGNRIRIFRNPKKNNVFDWEEVCLTSAYKELFNKYGINYQQGDIRALLCEQSDKAFYSSFMALMSLMLQMRNSITGRTDVDFLISPVKNSDGIFYDSRNYEAQENAILPKNADANGAYNIARKVLWAIGQFKKAEDEKLDKVKIAISNKEWLEYAQTSVKHAPAMVSKGEEDNMAIIKEFMRFKVHMEGSVNGHEFEIEGEGEGRPYEGTQTAKLKVTKGGPLPFAWDILSPQFMYGSKAYVKHPADIPDYLKLSFPEGFKWERVMNFEDGGVVTVTQDSSLQDGEFIYKVKLRGTNFPSDGPVMQKKTMGWEASSERMYPEDGALKGEIKQRLKLKDGGHYDAEVKTTYKAKKPVQLPGAYNVNIKLDITSHNEDYTIVEQYERAEGRHSTGGMDELYK

SEQ ID NO: 214 - protein, 1469 aa, synthetic construct
  REGION 1..1469: note = SYNTHETIC
MSKLEKFTNCYSLSKTLRFKAIPVGKTQENIDNKRLLVEDEKRAEDYKGVKKLLDRYYLSFINDVLHSIKLKNLNNYISLFRKKTRTEKENKELENLEINLRKEIAKAFKGNEGYKSLFKKDIIETILPEFLDDKDEIALVNSFNGFTTAFTGFFDNRENMFSEEAKSTSIAFRCINENLTRYISNMDIFEKVDAIFDKHEVQEIKEKILNSDYDVEDFFEGEFFNFVLTQEGIDVYNAIIGGFVTESGEKIKGLNEYINLYNQKTKQKLPKFKPLYKQVLSDRESLSFYGEGYTSDEEVLEVFRNTLNKNSEIFSSIKKLEKLFKNFDEYSSAGIFVKNGPAISTISKDIFGEWNVIRDKWNAEYDDIHLKKKAVVTEKYEDDRRKSFKKIGSFSLEQLQEYADADLSVVEKLKEIIIQKVDEIYKVYGSSEKLFDADFVLEKSLKKNDAVVAIMKDLLDSVKSFENYIKAFFGEGKETNRDESFYGDFVLAYDILLKVDHIYDAIRNYVTQKPYSKDKFKLYFQNPQFMGGWDKDKETDYRATILRYGSKYYLAIMDKKYAKCLQKIDKDDVNGNYEKINYKLLPGPNKMLPKVFFSKKWMAYYNPSEDIQKIYKNGTFKKGDMFNLNDCHKLIDFFKDSISRYPKWSNAYDFNFSETEKYKDIAGFYREVEEQGYKVSFESASKKEVDKLVEEGKLYMFQIYNKDFSDKSHGTPNLHTMYFKLLFDENNHGQIRLSGGAELFMRRASLKKEELVVHPANSPIANKNPDNPKKTTTLSYDVYKDKRFSEDQYELHIPIAINKCPKNIFKINTEVRVLLKHDDNPYVIGIDRGERNLLYIVVVDGKGNIVEQYSLNEIINNFNGIRIKTDYHSLLDKKEKERFEARQNWTSIENIKELKAGYISQVVHKICELVEKYDAVIALEDLNSGFKNSRVKVEKQVYQKFEKMLIDKLNYMVDKKSNPCATGGALKGYQITNKFESFKSMSTQNGFIFYIPAWLTSKIDPSTGFVNLLKTKYTSIADSKKFISSFDRIMYVPEEDLFEFALDYKNFSRTDADYIKKWKLYSYGNRIRIFRNPKKNNVFDWEEVCLTSAYKELFNKYGINYQQGDIRALLCEQSDKAFYSSFMALMSLMLQMRNSITGRTDVDFLISPVKNSDGIFYDSRNYEAQENAILPKNADANGAYNIARKVLWAIGQFKKAEDEKLDKVKIAISNKEWLEYAQTSVKHAPAPAMVSKGEEDNMAIIKEFMRFKVHMEGSVNGHEFEIEGEGEGRPYEGTQTAKLKVTKGGPLPFAWDILSPQFMYGSKAYVKHPADIPDYLKLSFPEGFKWERVMNFEDGGVVTVTQDSSLQDGEFIYKVKLRGTNFPSDGPVMQKKTMGWEASSERMYPEDGALKGEIKQRLKLKDGGHYDAEVKTTYKAKKPVQLPGAYNVNIKLDITSHNEDYTIVEQYERAEGRHSTGGMDELYK

SEQ ID NO: 215 - protein, 1471 aa, synthetic construct
  REGION 1..1471: note = SYNTHETIC
MSKLEKFTNCYSLSKTLRFKAIPVGKTQENIDNKRLLVEDEKRAEDYKGVKKLLDRYYLSFINDVLHSIKLKNLNNYISLFRKKTRTEKENKELENLEINLRKEIAKAFKGNEGYKSLFKKDIIETILPEFLDDKDEIALVNSFNGFTTAFTGFFDNRENMFSEEAKSTSIAFRCINENLTRYISNMDIFEKVDAIFDKHEVQEIKEKILNSDYDVEDFFEGEFFNFVLTQEGIDVYNAIIGGFVTESGEKIKGLNEYINLYNQKTKQKLPKFKPLYKQVLSDRESLSFYGEGYTSDEEVLEVFRNTLNKNSEIFSSIKKLEKLFKNFDEYSSAGIFVKNGPAISTISKDIFGEWNVIRDKWNAEYDDIHLKKKAVVTEKYEDDRRKSFKKIGSFSLEQLQEYADADLSVVEKLKEIIIQKVDEIYKVYGSSEKLFDADFVLEKSLKKNDAVVAIMKDLLDSVKSFENYIKAFFGEGKETNRDESFYGDFVLAYDILLKVDHIYDAIRNYVTQKPYSKDKFKLYFQNPQFMGGWDKDKETDYRATILRYGSKYYLAIMDKKYAKCLQKIDKDDVNGNYEKINYKLLPGPNKMLPKVFFSKKWMAYYNPSEDIQKIYKNGTFKKGDMFNLNDCHKLIDFFKDSISRYPKWSNAYDFNFSETEKYKDIAGFYREVEEQGYKVSFESASKKEVDKLVEEGKLYMFQIYNKDFSDKSHGTPNLHTMYFKLLFDENNHGQIRLSGGAELFMRRASLKKEELVVHPANSPIANKNPDNPKKTTTLSYDVYKDKRFSEDQYELHIPIAINKCPKNIFKINTEVRVLLKHDDNPYVIGIDRGERNLLYIVVVDGKGNIVEQYSLNEIINNFNGIRIKTDYHSLLDKKEKERFEARQNWTSIENIKELKAGYISQVVHKICELVEKYDAVIALEDLNSGFKNSRVKVEKQVYQKFEKMLIDKLNYMVDKKSNPCATGGALKGYQITNKFESFKSMSTQNGFIFYIPAWLTSKIDPSTGFVNLLKTKYTSIADSKKFISSFDRIMYVPEEDLFEFALDYKNFSRTDADYIKKWKLYSYGNRIRIFRNPKKNNVFDWEEVCLTSAYKELFNKYGINYQQGDIRALLCEQSDKAFYSSFMALMSLMLQMRNSITGRTDVDFLISPVKNSDGIFYDSRNYEAQENAILPKNADANGAYNIARKVLWAIGQFKKAEDEKLDKVKIAISNKEWLEYAQTSVKHAPAPAPAMVSKGEEDNMAIIKEFMRFKVHMEGSVNGHEFEIEGEGEGRPYEGTQTAKLKVTKGGPLPFAWDILSPQFMYGSKAYVKHPADIPDYLKLSFPEGFKWERVMNFEDGGVVTVTQDSSLQDGEFIYKVKLRGTNFPSDGPVMQKKTMGWEASSERMYPEDGALKGEIKQRLKLKDGGHYDAEVKTTYKAKKPVQLPGAYNVNIKLDITSHNEDYTIVEQYERAEGRHSTGGMDELYK

SEQ ID NO: 216 - protein, 1473 aa, synthetic construct
  REGION 1..1473: note = SYNTHETIC
MSKLEKFTNCYSLSKTLRFKAIPVGKTQENIDNKRLLVEDEKRAEDYKGVKKLLDRYYLSFINDVLHSIKLKNLNNYISLFRKKTRTEKENKELENLEINLRKEIAKAFKGNEGYKSLFKKDIIETILPEFLDDKDEIALVNSFNGFTTAFTGFFDNRENMFSEEAKSTSIAFRCINENLTRYISNMDIFEKVDAIFDKHEVQEIKEKILNSDYDVEDFFEGEFFNFVLTQEGIDVYNAIIGGFVTESGEKIKGLNEYINLYNQKTKQKLPKFKPLYKQVLSDRESLSFYGEGYTSDEEVLEVFRNTLNKNSEIFSSIKKLEKLFKNFDEYSSAGIFVKNGPAISTISKDIFGEWNVIRDKWNAEYDDIHLKKKAVVTEKYEDDRRKSFKKIGSFSLEQLQEYADADLSVVEKLKEIIIQKVDEIYKVYGSSEKLFDADFVLEKSLKKNDAVVAIMKDLLDSVKSFENYIKAFFGEGKETNRDESFYGDFVLAYDILLKVDHIYDAIRNYVTQKPYSKDKFKLYFQNPQFMGGWDKDKETDYRATILRYGSKYYLAIMDKKYAKCLQKIDKDDVNGNYEKINYKLLPGPNKMLPKVFFSKKWMAYYNPSEDIQKIYKNGTFKKGDMFNLNDCHKLIDFFKDSISRYPKWSNAYDFNFSETEKYKDIAGFYREVEEQGYKVSFESASKKEVDKLVEEGKLYMFQIYNKDFSDKSHGTPNLHTMYFKLLFDENNHGQIRLSGGAELFMRRASLKKEELVVHPANSPIANKNPDNPKKTTTLSYDVYKDKRFSEDQYELHIPIAINKCPKNIFKINTEVRVLLKHDDNPYVIGIDRGERNLLYIVVVDGKGNIVEQYSLNEIINNFNGIRIKTDYHSLLDKKEKERFEARQNWTSIENIKELKAGYISQVVHKICELVEKYDAVIALEDLNSGFKNSRVKVEKQVYQKFEKMLIDKLNYMVDKKSNPCATGGALKGYQITNKFESFKSMSTQNGFIFYIPAWLTSKIDPSTGFVNLLKTKYTSIADSKKFISSFDRIMYVPEEDLFEFALDYKNFSRTDADYIKKWKLYSYGNRIRIFRNPKKNNVFDWEEVCLTSAYKELFNKYGINYQQGDIRALLCEQSDKAFYSSFMALMSLMLQMRNSITGRTDVDFLISPVKNSDGIFYDSRNYEAQENAILPKNADANGAYNIARKVLWAIGQFKKAEDEKLDKVKIAISNKEWLEYAQTSVKHAPAPAPAPAMVSKGEEDNMAIIKEFMRFKVHMEGSVNGHEFEIEGEGEGRPYEGTQTAKLKVTKGGPLPFAWDILSPQFMYGSKAYVKHPADIPDYLKLSFPEGFKWERVMNFEDGGVVTVTQDSSLQDGEFIYKVKLRGTNFPSDGPVMQKKTMGWEASSERMYPEDGALKGEIKQRLKLKDGGHYDAEVKTTYKAKKPVQLPGAYNVNIKLDITSHNEDYTIVEQYERAEGRHSTGGMDELYK

SEQ ID NO: 217 - protein, 1475 aa, synthetic construct
  REGION 1..1475: note = SYNTHETIC
MSKLEKFTNCYSLSKTLRFKAIPVGKTQENIDNKRLLVEDEKRAEDYKGVKKLLDRYYLSFINDVLHSIKLKNLNNYISLFRKKTRTEKENKELENLEINLRKEIAKAFKGNEGYKSLFKKDIIETILPEFLDDKDEIALVNSFNGFTTAFTGFFDNRENMFSEEAKSTSIAFRCINENLTRYISNMDIFEKVDAIFDKHEVQEIKEKILNSDYDVEDFFEGEFFNFVLTQEGIDVYNAIIGGFVTESGEKIKGLNEYINLYNQKTKQKLPKFKPLYKQVLSDRESLSFYGEGYTSDEEVLEVFRNTLNKNSEIFSSIKKLEKLFKNFDEYSSAGIFVKNGPAISTISKDIFGEWNVIRDKWNAEYDDIHLKKKAVVTEKYEDDRRKSFKKIGSFSLEQLQEYADADLSVVEKLKEIIIQKVDEIYKVYGSSEKLFDADFVLEKSLKKNDAVVAIMKDLLDSVKSFENYIKAFFGEGKETNRDESFYGDFVLAYDILLKVDHIYDAIRNYVTQKPYSKDKFKLYFQNPQFMGGWDKDKETDYRATILRYGSKYYLAIMDKKYAKCLQKIDKDDVNGNYEKINYKLLPGPNKMLPKVFFSKKWMAYYNPSEDIQKIYKNGTFKKGDMFNLNDCHKLIDFFKDSISRYPKWSNAYDFNFSETEKYKDIAGFYREVEEQGYKVSFESASKKEVDKLVEEGKLYMFQIYNKDFSDKSHGTPNLHTMYFKLLFDENNHGQIRLSGGAELFMRRASLKKEELVVHPANSPIANKNPDNPKKTTTLSYDVYKDKRFSEDQYELHIPIAINKCPKNIFKINTEVRVLLKHDDNPYVIGIDRGERNLLYIVVVDGKGNIVEQYSLNEIINNFNGIRIKTDYHSLLDKKEKERFEARQNWTSIENIKELKAGYISQVVHKICELVEKYDAVIALEDLNSGFKNSRVKVEKQVYQKFEKMLIDKLNYMVDKKSNPCATGGALKGYQITNKFESFKSMSTQNGFIFYIPAWLTSKIDPSTGFVNLLKTKYTSIADSKKFISSFDRIMYVPEEDLFEFALDYKNFSRTDADYIKKWKLYSYGNRIRIFRNPKKNNVFDWEEVCLTSAYKELFNKYGINYQQGDIRALLCEQSDKAFYSSFMALMSLMLQMRNSITGRTDVDFLISPVKNSDGIFYDSRNYEAQENAILPKNADANGAYNIARKVLWAIGQFKKAEDEKLDKVKIAISNKEWLEYAQTSVKHAPAPAPAPAPAMVSKGEEDNMAIIKEFMRFKVHMEGSVNGHEFEIEGEGEGRPYEGTQTAKLKVTKGGPLPFAWDILSPQFMYGSKAYVKHPADIPDYLKLSFPEGFKWERVMNFEDGGVVTVTQDSSLQDGEFIYKVKLRGTNFPSDGPVMQKKTMGWEASSERMYPEDGALKGEIKQRLKLKDGGHYDAEVKTTYKAKKPVQLPGAYNVNIKLDITSHNEDYTIVEQYERAEGRHSTGGMDELYK

SEQ ID NO: 218 - protein, 1477 aa, synthetic construct
  REGION 1..1477: note = SYNTHETIC
MSKLEKFTNCYSLSKTLRFKAIPVGKTQENIDNKRLLVEDEKRAEDYKGVKKLLDRYYLSFINDVLHSIKLKNLNNYISLFRKKTRTEKENKELENLEINLRKEIAKAFKGNEGYKSLFKKDIIETILPEFLDDKDEIALVNSFNGFTTAFTGFFDNRENMFSEEAKSTSIAFRCINENLTRYISNMDIFEKVDAIFDKHEVQEIKEKILNSDYDVEDFFEGEFFNFVLTQEGIDVYNAIIGGFVTESGEKIKGLNEYINLYNQKTKQKLPKFKPLYKQVLSDRESLSFYGEGYTSDEEVLEVFRNTLNKNSEIFSSIKKLEKLFKNFDEYSSAGIFVKNGPAISTISKDIFGEWNVIRDKWNAEYDDIHLKKKAVVTEKYEDDRRKSFKKIGSFSLEQLQEYADADLSVVEKLKEIIIQKVDEIYKVYGSSEKLFDADFVLEKSLKKNDAVVAIMKDLLDSVKSFENYIKAFFGEGKETNRDESFYGDFVLAYDILLKVDHIYDAIRNYVTQKPYSKDKFKLYFQNPQFMGGWDKDKETDYRATILRYGSKYYLAIMDKKYAKCLQKIDKDDVNGNYEKINYKLLPGPNKMLPKVFFSKKWMAYYNPSEDIQKIYKNGTFKKGDMFNLNDCHKLIDFFKDSISRYPKWSNAYDFNFSETEKYKDIAGFYREVEEQGYKVSFESASKKEVDKLVEEGKLYMFQIYNKDFSDKSHGTPNLHTMYFKLLFDENNHGQIRLSGGAELFMRRASLKKEELVVHPANSPIANKNPDNPKKTTTLSYDVYKDKRFSEDQYELHIPIAINKCPKNIFKINTEVRVLLKHDDNPYVIGIDRGERNLLYIVVVDGKGNIVEQYSLNEIINNFNGIRIKTDYHSLLDKKEKERFEARQNWTSIENIKELKAGYISQVVHKICELVEKYDAVIALEDLNSGFKNSRVKVEKQVYQKFEKMLIDKLNYMVDKKSNPCATGGALKGYQITNKFESFKSMSTQNGFIFYIPAWLTSKIDPSTGFVNLLKTKYTSIADSKKFISSFDRIMYVPEEDLFEFALDYKNFSRTDADYIKKWKLYSYGNRIRIFRNPKKNNVFDWEEVCLTSAYKELFNKYGINYQQGDIRALLCEQSDKAFYSSFMALMSLMLQMRNSITGRTDVDFLISPVKNSDGIFYDSRNYEAQENAILPKNADANGAYNIARKVLWAIGQFKKAEDEKLDKVKIAISNKEWLEYAQTSVKHAPAPAPAPAPAPAMVSKGEEDNMAIIKEFMRFKVHMEGSVNGHEFEIEGEGEGRPYEGTQTAKLKVTKGGPLPFAWDILSPQFMYGSKAYVKHPADIPDYLKLSFPEGFKWERVMNFEDGGVVTVTQDSSLQDGEFIYKVKLRGTNFPSDGPVMQKKTMGWEASSERMYPEDGALKGEIKQRLKLKDGGHYDAEVKTTYKAKKPVQLPGAYNVNIKLDITSHNEDYTIVEQYERAEGRHSTGGMDELYK

SEQ ID NO: 219 - protein, 1479 aa, synthetic construct
  REGION 1..1479: note = SYNTHETIC
MSKLEKFTNCYSLSKTLRFKAIPVGKTQENIDNKRLLVEDEKRAEDYKGVKKLLDRYYLSFINDVLHSIKLKNLNNYISLFRKKTRTEKENKELENLEINLRKEIAKAFKGNEGYKSLFKKDIIETILPEFLDDKDEIALVNSFNGFTTAFTGFFDNRENMFSEEAKSTSIAFRCINENLTRYISNMDIFEKVDAIFDKHEVQEIKEKILNSDYDVEDFFEGEFFNFVLTQEGIDVYNAIIGGFVTESGEKIKGLNEYINLYNQKTKQKLPKFKPLYKQVLSDRESLSFYGEGYTSDEEVLEVFRNTLNKNSEIFSSIKKLEKLFKNFDEYSSAGIFVKNGPAISTISKDIFGEWNVIRDKWNAEYDDIHLKKKAVVTEKYEDDRRKSFKKIGSFSLEQLQEYADADLSVVEKLKEIIIQKVDEIYKVYGSSEKLFDADFVLEKSLKKNDAVVAIMKDLLDSVKSFENYIKAFFGEGKETNRDESFYGDFVLAYDILLKVDHIYDAIRNYVTQKPYSKDKFKLYFQNPQFMGGWDKDKETDYRATILRYGSKYYLAIMDKKYAKCLQKIDKDDVNGNYEKINYKLLPGPNKMLPKVFFSKKWMAYYNPSEDIQKIYKNGTFKKGDMFNLNDCHKLIDFFKDSISRYPKWSNAYDFNFSETEKYKDIAGFYREVEEQGYKVSFESASKKEVDKLVEEGKLYMFQIYNKDFSDKSHGTPNLHTMYFKLLFDENNHGQIRLSGGAELFMRRASLKKEELVVHPANSPIANKNPDNPKKTTTLSYDVYKDKRFSEDQYELHIPIAINKCPKNIFKINTEVRVLLKHDDNPYVIGIDRGERNLLYIVVVDGKGNIVEQYSLNEIINNFNGIRIKTDYHSLLDKKEKERFEARQNWTSIENIKELKAGYISQVVHKICELVEKYDAVIALEDLNSGFKNSRVKVEKQVYQKFEKMLIDKLNYMVDKKSNPCATGGALKGYQITNKFESFKSMSTQNGFIFYIPAWLTSKIDPSTGFVNLLKTKYTSIADSKKFISSFDRIMYVPEEDLFEFALDYKNFSRTDADYIKKWKLYSYGNRIRIFRNPKKNNVFDWEEVCLTSAYKELFNKYGINYQQGDIRALLCEQSDKAFYSSFMALMSLMLQMRNSITGRTDVDFLISPVKNSDGIFYDSRNYEAQENAILPKNADANGAYNIARKVLWAIGQFKKAEDEKLDKVKIAISNKEWLEYAQTSVKHAPAPAPAPAPAPAPAMVSKGEEDNMAIIKEFMRFKVHMEGSVNGHEFEIEGEGEGRPYEGTQTAKLKVTKGGPLPFAWDILSPQFMYGSKAYVKHPADIPDYLKLSFPEGFKWERVMNFEDGGVVTVTQDSSLQDGEFIYKVKLRGTNFPSDGPVMQKKTMGWEASSERMYPEDGALKGEIKQRLKLKDGGHYDAEVKTTYKAKKPVQLPGAYNVNIKLDITSHNEDYTIVEQYERAEGRHSTGGMDELYK

SEQ ID NO: 220 - protein, 1481 aa, synthetic construct
  REGION 1..1481: note = SYNTHETIC
MSKLEKFTNCYSLSKTLRFKAIPVGKTQENIDNKRLLVEDEKRAEDYKGVKKLLDRYYLSFINDVLHSIKLKNLNNYISLFRKKTRTEKENKELENLEINLRKEIAKAFKGNEGYKSLFKKDIIETILPEFLDDKDEIALVNSFNGFTTAFTGFFDNRENMFSEEAKSTSIAFRCINENLTRYISNMDIFEKVDAIFDKHEVQEIKEKILNSDYDVEDFFEGEFFNFVLTQEGIDVYNAIIGGFVTESGEKIKGLNEYINLYNQKTKQKLPKFKPLYKQVLSDRESLSFYGEGYTSDEEVLEVFRNTLNKNSEIFSSIKKLEKLFKNFDEYSSAGIFVKNGPAISTISKDIFGEWNVIRDKWNAEYDDIHLKKKAVVTEKYEDDRRKSFKKIGSFSLEQLQEYADADLSVVEKLKEIIIQKVDEIYKVYGSSEKLFDADFVLEKSLKKNDAVVAIMKDLLDSVKSFENYIKAFFGEGKETNRDESFYGDFVLAYDILLKVDHIYDAIRNYVTQKPYSKDKFKLYFQNPQFMGGWDKDKETDYRATILRYGSKYYLAIMDKKYAKCLQKIDKDDVNGNYEKINYKLLPGPNKMLPKVFFSKKWMAYYNPSEDIQKIYKNGTFKKGDMFNLNDCHKLIDFFKDSISRYPKWSNAYDFNFSETEKYKDIAGFYREVEEQGYKVSFESASKKEVDKLVEEGKLYMFQIYNKDFSDKSHGTPNLHTMYFKLLFDENNHGQIRLSGGAELFMRRASLKKEELVVHPANSPIANKNPDNPKKTTTLSYDVYKDKRFSEDQYELHIPIAINKCPKNIFKINTEVRVLLKHDDNPYVIGIDRGERNLLYIVVVDGKGNIVEQYSLNEIINNFNGIRIKTDYHSLLDKKEKERFEARQNWTSIENIKELKAGYISQVVHKICELVEKYDAVIALEDLNSGFKNSRVKVEKQVYQKFEKMLIDKLNYMVDKKSNPCATGGALKGYQITNKFESFKSMSTQNGFIFYIPAWLTSKIDPSTGFVNLLKTKYTSIADSKKFISSFDRIMYVPEEDLFEFALDYKNFSRTDADYIKKWKLYSYGNRIRIFRNPKKNNVFDWEEVCLTSAYKELFNKYGINYQQGDIRALLCEQSDKAFYSSFMALMSLMLQMRNSITGRTDVDFLISPVKNSDGIFYDSRNYEAQENAILPKNADANGAYNIARKVLWAIGQFKKAEDEKLDKVKIAISNKEWLEYAQTSVKHAPAPAPAPAPAPAPAPAMVSKGEEDNMAIIKEFMRFKVHMEGSVNGHEFEIEGEGEGRPYEGTQTAKLKVTKGGPLPFAWDILSPQFMYGSKAYVKHPADIPDYLKLSFPEGFKWERVMNFEDGGVVTVTQDSSLQDGEFIYKVKLRGTNFPSDGPVMQKKTMGWEASSERMYPEDGALKGEIKQRLKLKDGGHYDAEVKTTYKAKKPVQLPGAYNVNIKLDITSHNEDYTIVEQYERAEGRHSTGGMDELYK

SEQ ID NO: 221 - protein, 1483 aa, synthetic construct
  REGION 1..1483: note = SYNTHETIC
MSKLEKFTNCYSLSKTLRFKAIPVGKTQENIDNKRLLVEDEKRAEDYKGVKKLLDRYYLSFINDVLHSIKLKNLNNYISLFRKKTRTEKENKELENLEINLRKEIAKAFKGNEGYKSLFKKDIIETILPEFLDDKDEIALVNSFNGFTTAFTGFFDNRENMFSEEAKSTSIAFRCINENLTRYISNMDIFEKVDAIFDKHEVQEIKEKILNSDYDVEDFFEGEFFNFVLTQEGIDVYNAIIGGFVTESGEKIKGLNEYINLYNQKTKQKLPKFKPLYKQVLSDRESLSFYGEGYTSDEEVLEVFRNTLNKNSEIFSSIKKLEKLFKNFDEYSSAGIFVKNGPAISTISKDIFGEWNVIRDKWNAEYDDIHLKKKAVVTEKYEDDRRKSFKKIGSFSLEQLQEYADADLSVVEKLKEIIIQKVDEIYKVYGSSEKLFDADFVLEKSLKKNDAVVAIMKDLLDSVKSFENYIKAFFGEGKETNRDESFYGDFVLAYDILLKVDHIYDAIRNYVTQKPYSKDKFKLYFQNPQFMGGWDKDKETDYRATILRYGSKYYLAIMDKKYAKCLQKIDKDDVNGNYEKINYKLLPGPNKMLPKVFFSKKWMAYYNPSEDIQKIYKNGTFKKGDMFNLNDCHKLIDFFKDSISRYPKWSNAYDFNFSETEKYKDIAGFYREVEEQGYKVSFESASKKEVDKLVEEGKLYMFQIYNKDFSDKSHGTPNLHTMYFKLLFDENNHGQIRLSGGAELFMRRASLKKEELVVHPANSPIANKNPDNPKKTTTLSYDVYKDKRFSEDQYELHIPIAINKCPKNIFKINTEVRVLLKHDDNPYVIGIDRGERNLLYIVVVDGKGNIVEQYSLNEIINNFNGIRIKTDYHSLLDKKEKERFEARQNWTSIENIKELKAGYISQVVHKICELVEKYDAVIALEDLNSGFKNSRVKVEKQVYQKFEKMLIDKLNYMVDKKSNPCATGGALKGYQITNKFESFKSMSTQNGFIFYIPAWLTSKIDPSTGFVNLLKTKYTSIADSKKFISSFDRIMYVPEEDLFEFALDYKNFSRTDADYIKKWKLYSYGNRIRIFRNPKKNNVFDWEEVCLTSAYKELFNKYGINYQQGDIRALLCEQSDKAFYSSFMALMSLMLQMRNSITGRTDVDFLISPVKNSDGIFYDSRNYEAQENAILPKNADANGAYNIARKVLWAIGQFKKAEDEKLDKVKIAISNKEWLEYAQTSVKHAPAPAPAPAPAPAPAPAPAMVSKGEEDNMAIIKEFMRFKVHMEGSVNGHEFEIEGEGEGRPYEGTQTAKLKVTKGGPLPFAWDILSPQFMYGSKAYVKHPADIPDYLKLSFPEGFKWERVMNFEDGGVVTVTQDSSLQDGEFIYKVKLRGTNFPSDGPVMQKKTMGWEASSERMYPEDGALKGEIKQRLKLKDGGHYDAEVKTTYKAKKPVQLPGAYNVNIKLDITSHNEDYTIVEQYERAEGRHSTGGMDELYK

SEQ ID NO: 222 - protein, 1485 aa, synthetic construct
  REGION 1..1485: note = SYNTHETIC
MSKLEKFTNCYSLSKTLRFKAIPVGKTQENIDNKRLLVEDEKRAEDYKGVKKLLDRYYLSFINDVLHSIKLKNLNNYISLFRKKTRTEKENKELENLEINLRKEIAKAFKGNEGYKSLFKKDIIETILPEFLDDKDEIALVNSFNGFTTAFTGFFDNRENMFSEEAKSTSIAFRCINENLTRYISNMDIFEKVDAIFDKHEVQEIKEKILNSDYDVEDFFEGEFFNFVLTQEGIDVYNAIIGGFVTESGEKIKGLNEYINLYNQKTKQKLPKFKPLYKQVLSDRESLSFYGEGYTSDEEVLEVFRNTLNKNSEIFSSIKKLEKLFKNFDEYSSAGIFVKNGPAISTISKDIFGEWNVIRDKWNAEYDDIHLKKKAVVTEKYEDDRRKSFKKIGSFSLEQLQEYADADLSVVEKLKEIIIQKVDEIYKVYGSSEKLFDADFVLEKSLKKNDAVVAIMKDLLDSVKSFENYIKAFFGEGKETNRDESFYGDFVLAYDILLKVDHIYDAIRNYVTQKPYSKDKFKLYFQNPQFMGGWDKDKETDYRATILRYGSKYYLAIMDKKYAKCLQKIDKDDVNGNYEKINYKLLPGPNKMLPKVFFSKKWMAYYNPSEDIQKIYKNGTFKKGDMFNLNDCHKLIDFFKDSISRYPKWSNAYDFNFSETEKYKDIAGFYREVEEQGYKVSFESASKKEVDKLVEEGKLYMFQIYNKDFSDKSHGTPNLHTMYFKLLFDENNHGQIRLSGGAELFMRRASLKKEELVVHPANSPIANKNPDNPKKTTTLSYDVYKDKRFSEDQYELHIPIAINKCPKNIFKINTEVRVLLKHDDNPYVIGIDRGERNLLYIVVVDGKGNIVEQYSLNEIINNFNGIRIKTDYHSLLDKKEKERFEARQNWTSIENIKELKAGYISQVVHKICELVEKYDAVIALEDLNSGFKNSRVKVEKQVYQKFEKMLIDKLNYMVDKKSNPCATGGALKGYQITNKFESFKSMSTQNGFIFYIPAWLTSKIDPSTGFVNLLKTKYTSIADSKKFISSFDRIMYVPEEDLFEFALDYKNFSRTDADYIKKWKLYSYGNRIRIFRNPKKNNVFDWEEVCLTSAYKELFNKYGINYQQGDIRALLCEQSDKAFYSSFMALMSLMLQMRNSITGRTDVDFLISPVKNSDGIFYDSRNYEAQENAILPKNADANGAYNIARKVLWAIGQFKKAEDEKLDKVKIAISNKEWLEYAQTSVKHAPAPAPAPAPAPAPAPAPAPAMVSKGEEDNMAIIKEFMRFKVHMEGSVNGHEFEIEGEGEGRPYEGTQTAKLKVTKGGPLPFAWDILSPQFMYGSKAYVKHPADIPDYLKLSFPEGFKWERVMNFEDGGVVTVTQDSSLQDGEFIYKVKLRGTNFPSDGPVMQKKTMGWEASSERMYPEDGALKGEIKQRLKLKDGGHYDAEVKTTYKAKKPVQLPGAYNVNIKLDITSHNEDYTIVEQYERAEGRHSTGGMDELYK

SEQ ID NO: 223 - protein, 1487 aa, synthetic construct
  REGION 1..1487: note = SYNTHETIC
MSKLEKFTNCYSLSKTLRFKAIPVGKTQENIDNKRLLVEDEKRAEDYKGVKKLLDRYYLSFINDVLHSIKLKNLNNYISLFRKKTRTEKENKELENLEINLRKEIAKAFKGNEGYKSLFKKDIIETILPEFLDDKDEIALVNSFNGFTTAFTGFFDNRENMFSEEAKSTSIAFRCINENLTRYISNMDIFEKVDAIFDKHEVQEIKEKILNSDYDVEDFFEGEFFNFVLTQEGIDVYNAIIGGFVTESGEKIKGLNEYINLYNQKTKQKLPKFKPLYKQVLSDRESLSFYGEGYTSDEEVLEVFRNTLNKNSEIFSSIKKLEKLFKNFDEYSSAGIFVKNGPAISTISKDIFGEWNVIRDKWNAEYDDIHLKKKAVVTEKYEDDRRKSFKKIGSFSLEQLQEYADADLSVVEKLKEIIIQKVDEIYKVYGSSEKLFDADFVLEKSLKKNDAVVAIMKDLLDSVKSFENYIKAFFGEGKETNRDESFYGDFVLAYDILLKVDHIYDAIRNYVTQKPYSKDKFKLYFQNPQFMGGWDKDKETDYRATILRYGSKYYLAIMDKKYAKCLQKIDKDDVNGNYEKINYKLLPGPNKMLPKVFFSKKWMAYYNPSEDIQKIYKNGTFKKGDMFNLNDCHKLIDFFKDSISRYPKWSNAYDFNFSETEKYKDIAGFYREVEEQGYKVSFESASKKEVDKLVEEGKLYMFQIYNKDFSDKSHGTPNLHTMYFKLLFDENNHGQIRLSGGAELFMRRASLKKEELVVHPANSPIANKNPDNPKKTTTLSYDVYKDKRFSEDQYELHIPIAINKCPKNIFKINTEVRVLLKHDDNPYVIGIDRGERNLLYIVVVDGKGNIVEQYSLNEIINNFNGIRIKTDYHSLLDKKEKERFEARQNWTSIENIKELKAGYISQVVHKICELVEKYDAVIALEDLNSGFKNSRVKVEKQVYQKFEKMLIDKLNYMVDKKSNPCATGGALKGYQITNKFESFKSMSTQNGFIFYIPAWLTSKIDPSTGFVNLLKTKYTSIADSKKFISSFDRIMYVPEEDLFEFALDYKNFSRTDADYIKKWKLYSYGNRIRIFRNPKKNNVFDWEEVCLTSAYKELFNKYGINYQQGDIRALLCEQSDKAFYSSFMALMSLMLQMRNSITGRTDVDFLISPVKNSDGIFYDSRNYEAQENAILPKNADANGAYNIARKVLWAIGQFKKAEDEKLDKVKIAISNKEWLEYAQTSVKHAPAPAPAPAPAPAPAPAPAPAPAMVSKGEEDNMAIIKEFMRFKVHMEGSVNGHEFEIEGEGEGRPYEGTQTAKLKVTKGGPLPFAWDILSPQFMYGSKAYVKHPADIPDYLKLSFPEGFKWERVMNFEDGGVVTVTQDSSLQDGEFIYKVKLRGTNFPSDGPVMQKKTMGWEASSERMYPEDGALKGEIKQRLKLKDGGHYDAEVKTTYKAKKPVQLPGAYNVNIKLDITSHNEDYTIVEQYERAEGRHSTGGMDELYK

SEQ ID NO: 224 - protein, 1489 aa, synthetic construct
  REGION 1..1489: note = SYNTHETIC
MSKLEKFTNCYSLSKTLRFKAIPVGKTQENIDNKRLLVEDEKRAEDYKGVKKLLDRYYLSFINDVLHSIKLKNLNNYISLFRKKTRTEKENKELENLEINLRKEIAKAFKGNEGYKSLFKKDIIETILPEFLDDKDEIALVNSFNGFTTAFTGFFDNRENMFSEEAKSTSIAFRCINENLTRYISNMDIFEKVDAIFDKHEVQEIKEKILNSDYDVEDFFEGEFFNFVLTQEGIDVYNAIIGGFVTESGEKIKGLNEYINLYNQKTKQKLPKFKPLYKQVLSDRESLSFYGEGYTSDEEVLEVFRNTLNKNSEIFSSIKKLEKLFKNFDEYSSAGIFVKNGPAISTISKDIFGEWNVIRDKWNAEYDDIHLKKKAVVTEKYEDDRRKSFKKIGSFSLEQLQEYADADLSVVEKLKEIIIQKVDEIYKVYGSSEKLFDADFVLEKSLKKNDAVVAIMKDLLDSVKSFENYIKAFFGEGKETNRDESFYGDFVLAYDILLKVDHIYDAIRNYVTQKPYSKDKFKLYFQNPQFMGGWDKDKETDYRATILRYGSKYYLAIMDKKYAKCLQKIDKDDVNGNYEKINYKLLPGPNKMLPKVFFSKKWMAYYNPSEDIQKIYKNGTFKKGDMFNLNDCHKLIDFFKDSISRYPKWSNAYDFNFSETEKYKDIAGFYREVEEQGYKVSFESASKKEVDKLVEEGKLYMFQIYNKDFSDKSHGTPNLHTMYFKLLFDENNHGQIRLSGGAELFMRRASLKKEELVVHPANSPIANKNPDNPKKTTTLSYDVYKDKRFSEDQYELHIPIAINKCPKNIFKINTEVRVLLKHDDNPYVIGIDRGERNLLYIVVVDGKGNIVEQYSLNEIINNFNGIRIKTDYHSLLDKKEKERFEARQNWTSIENIKELKAGYISQVVHKICELVEKYDAVIALEDLNSGFKNSRVKVEKQVYQKFEKMLIDKLNYMVDKKSNPCATGGALKGYQITNKFESFKSMSTQNGFIFYIPAWLTSKIDPSTGFVNLLKTKYTSIADSKKFISSFDRIMYVPEEDLFEFALDYKNFSRTDADYIKKWKLYSYGNRIRIFRNPKKNNVFDWEEVCLTSAYKELFNKYGINYQQGDIRALLCEQSDKAFYSSFMALMSLMLQMRNSITGRTDVDFLISPVKNSDGIFYDSRNYEAQENAILPKNADANGAYNIARKVLWAIGQFKKAEDEKLDKVKIAISNKEWLEYAQTSVKHAPAPAPAPAPAPAPAPAPAPAPAPAMVSKGEEDNMAIIKEFMRFKVHMEGSVNGHEFEIEGEGEGRPYEGTQTAKLKVTKGGPLPFAWDILSPQFMYGSKAYVKHPADIPDYLKLSFPEGFKWERVMNFEDGGVVTVTQDSSLQDGEFIYKVKLRGTNFPSDGPVMQKKTMGWEASSERMYPEDGALKGEIKQRLKLKDGGHYDAEVKTTYKAKKPVQLPGAYNVNIKLDITSHNEDYTIVEQYERAEGRHSTGGMDELYK

SEQ ID NO: 225 - protein, 1491 aa, synthetic construct
  REGION 1..1491: note = SYNTHETIC
MSKLEKFTNCYSLSKTLRFKAIPVGKTQENIDNKRLLVEDEKRAEDYKGVKKLLDRYYLSFINDVLHSIKLKNLNNYISLFRKKTRTEKENKELENLEINLRKEIAKAFKGNEGYKSLFKKDIIETILPEFLDDKDEIALVNSFNGFTTAFTGFFDNRENMFSEEAKSTSIAFRCINENLTRYISNMDIFEKVDAIFDKHEVQEIKEKILNSDYDVEDFFEGEFFNFVLTQEGIDVYNAIIGGFVTESGEKIKGLNEYINLYNQKTKQKLPKFKPLYKQVLSDRESLSFYGEGYTSDEEVLEVFRNTLNKNSEIFSSIKKLEKLFKNFDEYSSAGIFVKNGPAISTISKDIFGEWNVIRDKWNAEYDDIHLKKKAVVTEKYEDDRRKSFKKIGSFSLEQLQEYADADLSVVEKLKEIIIQKVDEIYKVYGSSEKLFDADFVLEKSLKKNDAVVAIMKDLLDSVKSFENYIKAFFGEGKETNRDESFYGDFVLAYDILLKVDHIYDAIRNYVTQKPYSKDKFKLYFQNPQFMGGWDKDKETDYRATILRYGSKYYLAIMDKKYAKCLQKIDKDDVNGNYEKINYKLLPGPNKMLPKVFFSKKWMAYYNPSEDIQKIYKNGTFKKGDMFNLNDCHKLIDFFKDSISRYPKWSNAYDFNFSETEKYKDIAGFYREVEEQGYKVSFESASKKEVDKLVEEGKLYMFQIYNKDFSDKSHGTPNLHTMYFKLLFDENNHGQIRLSGGAELFMRRASLKKEELVVHPANSPIANKNPDNPKKTTTLSYDVYKDKRFSEDQYELHIPIAINKCPKNIFKINTEVRVLLKHDDNPYVIGIDRGERNLLYIVVVDGKGNIVEQYSLNEIINNFNGIRIKTDYHSLLDKKEKERFEARQNWTSIENIKELKAGYISQVVHKICELVEKYDAVIALEDLNSGFKNSRVKVEKQVYQKFEKMLIDKLNYMVDKKSNPCATGGALKGYQITNKFESFKSMSTQNGFIFYIPAWLTSKIDPSTGFVNLLKTKYTSIADSKKFISSFDRIMYVPEEDLFEFALDYKNFSRTDADYIKKWKLYSYGNRIRIFRNPKKNNVFDWEEVCLTSAYKELFNKYGINYQQGDIRALLCEQSDKAFYSSFMALMSLMLQMRNSITGRTDVDFLISPVKNSDGIFYDSRNYEAQENAILPKNADANGAYNIARKVLWAIGQFKKAEDEKLDKVKIAISNKEWLEYAQTSVKHAPAPAPAPAPAPAPAPAPAPAPAPAPAMVSKGEEDNMAIIKEFMRFKVHMEGSVNGHEFEIEGEGEGRPYEGTQTAKLKVTKGGPLPFAWDILSPQFMYGSKAYVKHPADIPDYLKLSFPEGFKWERVMNFEDGGVVTVTQDSSLQDGEFIYKVKLRGTNFPSDGPVMQKKTMGWEASSERMYPEDGALKGEIKQRLKLKDGGHYDAEVKTTYKAKKPVQLPGAYNVNIKLDITSHNEDYTIVEQYERAEGRHSTGGMDELYK

SEQ ID NO: 226 - protein, 1493 aa, synthetic construct
  REGION 1..1493: note = SYNTHETIC
MSKLEKFTNCYSLSKTLRFKAIPVGKTQENIDNKRLLVEDEKRAEDYKGVKKLLDRYYLSFINDVLHSIKLKNLNNYISLFRKKTRTEKENKELENLEINLRKEIAKAFKGNEGYKSLFKKDIIETILPEFLDDKDEIALVNSFNGFTTAFTGFFDNRENMFSEEAKSTSIAFRCINENLTRYISNMDIFEKVDAIFDKHEVQEIKEKILNSDYDVEDFFEGEFFNFVLTQEGIDVYNAIIGGFVTESGEKIKGLNEYINLYNQKTKQKLPKFKPLYKQVLSDRESLSFYGEGYTSDEEVLEVFRNTLNKNSEIFSSIKKLEKLFKNFDEYSSAGIFVKNGPAISTISKDIFGEWNVIRDKWNAEYDDIHLKKKAVVTEKYEDDRRKSFKKIGSFSLEQLQEYADADLSVVEKLKEIIIQKVDEIYKVYGSSEKLFDADFVLEKSLKKNDAVVAIMKDLLDSVKSFENYIKAFFGEGKETNRDESFYGDFVLAYDILLKVDHIYDAIRNYVTQKPYSKDKFKLYFQNPQFMGGWDKDKETDYRATILRYGSKYYLAIMDKKYAKCLQKIDKDDVNGNYEKINYKLLPGPNKMLPKVFFSKKWMAYYNPSEDIQKIYKNGTFKKGDMFNLNDCHKLIDFFKDSISRYPKWSNAYDFNFSETEKYKDIAGFYREVEEQGYKVSFESASKKEVDKLVEEGKLYMFQIYNKDFSDKSHGTPNLHTMYFKLLFDENNHGQIRLSGGAELFMRRASLKKEELVVHPANSPIANKNPDNPKKTTTLSYDVYKDKRFSEDQYELHIPIAINKCPKNIFKINTEVRVLLKHDDNPYVIGIDRGERNLLYIVVVDGKGNIVEQYSLNEIINNFNGIRIKTDYHSLLDKKEKERFEARQNWTSIENIKELKAGYISQVVHKICELVEKYDAVIALEDLNSGFKNSRVKVEKQVYQKFEKMLIDKLNYMVDKKSNPCATGGALKGYQITNKFESFKSMSTQNGFIFYIPAWLTSKIDPSTGFVNLLKTKYTSIADSKKFISSFDRIMYVPEEDLFEFALDYKNFSRTDADYIKKWKLYSYGNRIRIFRNPKKNNVFDWEEVCLTSAYKELFNKYGINYQQGDIRALLCEQSDKAFYSSFMALMSLMLQMRNSITGRTDVDFLISPVKNSDGIFYDSRNYEAQENAILPKNADANGAYNIARKVLWAIGQFKKAEDEKLDKVKIAISNKEWLEYAQTSVKHAPAPAPAPAPAPAPAPAPAPAPAPAPAPAMVSKGEEDNMAIIKEFMRFKVHMEGSVNGHEFEIEGEGEGRPYEGTQTAKLKVTKGGPLPFAWDILSPQFMYGSKAYVKHPADIPDYLKLSFPEGFKWERVMNFEDGGVVTVTQDSSLQDGEFIYKVKLRGTNFPSDGPVMQKKTMGWEASSERMYPEDGALKGEIKQRLKLKDGGHYDAEVKTTYKAKKPVQLPGAYNVNIKLDITSHNEDYTIVEQYERAEGRHSTGGMDELYK

SEQ ID NO: 227 - protein, 1466 aa, synthetic construct
  REGION 1..1466: note = SYNTHETIC
  VARIANT 1229: note = X can be any naturally occurring amino acid
MSKLEKFTNCYSLSKTLRFKAIPVGKTQENIDNKRLLVEDEKRAEDYKGVKKLLDRYYLSFINDVLHSIKLKNLNNYISLFRKKTRTEKENKELENLEINLRKEIAKAFKGNEGYKSLFKKDIIETILPEFLDDKDEIALVNSFNGFTTAFTGFFDNRENMFSEEAKSTSIAFRCINENLTRYISNMDIFEKVDAIFDKHEVQEIKEKILNSDYDVEDFFEGEFFNFVLTQEGIDVYNAIIGGFVTESGEKIKGLNEYINLYNQKTKQKLPKFKPLYKQVLSDRESLSFYGEGYTSDEEVLEVFRNTLNKNSEIFSSIKKLEKLFKNFDEYSSAGIFVKNGPAISTISKDIFGEWNVIRDKWNAEYDDIHLKKKAVVTEKYEDDRRKSFKKIGSFSLEQLQEYADADLSVVEKLKEIIIQKVDEIYKVYGSSEKLFDADFVLEKSLKKNDAVVAIMKDLLDSVKSFENYIKAFFGEGKETNRDESFYGDFVLAYDILLKVDHIYDAIRNYVTQKPYSKDKFKLYFQNPQFMGGWDKDKETDYRATILRYGSKYYLAIMDKKYAKCLQKIDKDDVNGNYEKINYKLLPGPNKMLPKVFFSKKWMAYYNPSEDIQKIYKNGTFKKGDMFNLNDCHKLIDFFKDSISRYPKWSNAYDFNFSETEKYKDIAGFYREVEEQGYKVSFESASKKEVDKLVEEGKLYMFQIYNKDFSDKSHGTPNLHTMYFKLLFDENNHGQIRLSGGAELFMRRASLKKEELVVHPANSPIANKNPDNPKKTTTLSYDVYKDKRFSEDQYELHIPIAINKCPKNIFKINTEVRVLLKHDDNPYVIGIDRGERNLLYIVVVDGKGNIVEQYSLNEIINNFNGIRIKTDYHSLLDKKEKERFEARQNWTSIENIKELKAGYISQVVHKICELVEKYDAVIALEDLNSGFKNSRVKVEKQVYQKFEKMLIDKLNYMVDKKSNPCATGGALKGYQITNKFESFKSMSTQNGFIFYIPAWLTSKIDPSTGFVNLLKTKYTSIADSKKFISSFDRIMYVPEEDLFEFALDYKNFSRTDADYIKKWKLYSYGNRIRIFRNPKKNNVFDWEEVCLTSAYKELFNKYGINYQQGDIRALLCEQSDKAFYSSFMALMSLMLQMRNSITGRTDVDFLISPVKNSDGIFYDSRNYEAQENAILPKNADANGAYNIARKVLWAIGQFKKAEDEKLDKVKIAISNKEWLEYAQTSVKHXPMVSKGEEDNMAIIKEFMRFKVHMEGSVNGHEFEIEGEGEGRPYEGTQTAKLKVTKGGPLPFAWDILSPQFMYGSKAYVKHPADIPDYLKLSFPEGFKWERVMNFEDGGVVTVTQDSSLQDGEFIYKVKLRGTNFPSDGPVMQKKTMGWEASSERMYPEDGALKGEIKQRLKLKDGGHYDAEVKTTYKAKKPVQLPGAYNVNIKLDITSHNEDYTIVEQYERAEGRHSTGGMDELYK

SEQ ID NO: 228 - protein, 1468 aa, synthetic construct
  REGION 1..1468: note = SYNTHETIC
  VARIANT 1229: note = X can be any naturally occurring amino acid
  VARIANT 1231: note = X can be any naturally occurring amino acid
MSKLEKFTNCYSLSKTLRFKAIPVGKTQENIDNKRLLVEDEKRAEDYKGVKKLLDRYYLSFINDVLHSIKLKNLNNYISLFRKKTRTEKENKELENLEINLRKEIAKAFKGNEGYKSLFKKDIIETILPEFLDDKDEIALVNSFNGFTTAFTGFFDNRENMFSEEAKSTSIAFRCINENLTRYISNMDIFEKVDAIFDKHEVQEIKEKILNSDYDVEDFFEGEFFNFVLTQEGIDVYNAIIGGFVTESGEKIKGLNEYINLYNQKTKQKLPKFKPLYKQVLSDRESLSFYGEGYTSDEEVLEVFRNTLNKNSEIFSSIKKLEKLFKNFDEYSSAGIFVKNGPAISTISKDIFGEWNVIRDKWNAEYDDIHLKKKAVVTEKYEDDRRKSFKKIGSFSLEQLQEYADADLSVVEKLKEIIIQKVDEIYKVYGSSEKLFDADFVLEKSLKKNDAVVAIMKDLLDSVKSFENYIKAFFGEGKETNRDESFYGDFVLAYDILLKVDHIYDAIRNYVTQKPYSKDKFKLYFQNPQFMGGWDKDKETDYRATILRYGSKYYLAIMDKKYAKCLQKIDKDDVNGNYEKINYKLLPGPNKMLPKVFFSKKWMAYYNPSEDIQKIYKNGTFKKGDMFNLNDCHKLIDFFKDSISRYPKWSNAYDFNFSETEKYKDIAGFYREVEEQGYKVSFESASKKEVDKLVEEGKLYMFQIYNKDFSDKSHGTPNLHTMYFKLLFDENNHGQIRLSGGAELFMRRASLKKEELVVHPANSPIANKNPDNPKKTTTLSYDVYKDKRFSEDQYELHIPIAINKCPKNIFKINTEVRVLLKHDDNPYVIGIDRGERNLLYIVVVDGKGNIVEQYSLNEIINNFNGIRIKTDYHSLLDKKEKERFEARQNWTSIENIKELKAGYISQVVHKICELVEKYDAVIALEDLNSGFKNSRVKVEKQVYQKFEKMLIDKLNYMVDKKSNPCATGGALKGYQITNKFESFKSMSTQNGFIFYIPAWLTSKIDPSTGFVNLLKTKYTSIADSKKFISSFDRIMYVPEEDLFEFALDYKNFSRTDADYIKKWKLYSYGNRIRIFRNPKKNNVFDWEEVCLTSAYKELFNKYGINYQQGDIRALLCEQSDKAFYSSFMALMSLMLQMRNSITGRTDVDFLISPVKNSDGIFYDSRNYEAQENAILPKNADANGAYNIARKVLWAIGQFKKAEDEKLDKVKIAISNKEWLEYAQTSVKHXPXPMVSKGEEDNMAIIKEFMRFKVHMEGSVNGHEFEIEGEGEGRPYEGTQTAKLKVTKGGPLPFAWDILSPQFMYGSKAYVKHPADIPDYLKLSFPEGFKWERVMNFEDGGVVTVTQDSSLQDGEFIYKVKLRGTNFPSDGPVMQKKTMGWEASSERMYPEDGALKGEIKQRLKLKDGGHYDAEVKTTYKAKKPVQLPGAYNVNIKLDITSHNEDYTIVEQYERAEGRHSTGGMDELYK

SEQ ID NO: 229 - protein, 1470 aa, synthetic construct
  REGION 1..1470: note = SYNTHETIC
  VARIANT 1229: note = X can be any naturally occurring amino acid
  VARIANT 1231: note = X can be any naturally occurring amino acid
  VARIANT 1233: note = X can be any naturally occurring amino acid
MSKLEKFTNCYSLSKTLRFKAIPVGKTQENIDNKRLLVEDEKRAEDYKGVKKLLDRYYLSFINDVLHSIKLKNLNNYISLFRKKTRTEKENKELENLEINLRKEIAKAFKGNEGYKSLFKKDIIETILPEFLDDKDEIALVNSFNGFTTAFTGFFDNRENMFSEEAKSTSIAFRCINENLTRYISNMDIFEKVDAIFDKHEVQEIKEKILNSDYDVEDFFEGEFFNFVLTQEGIDVYNAIIGGFVTESGEKIKGLNEYINLYNQKTKQKLPKFKPLYKQVLSDRESLSFYGEGYTSDEEVLEVFRNTLNKNSEIFSSIKKLEKLFKNFDEYSSAGIFVKNGPAISTISKDIFGEWNVIRDKWNAEYDDIHLKKKAVVTEKYEDDRRKSFKKIGSFSLEQLQEYADADLSVVEKLKEIIIQKVDEIYKVYGSSEKLFDADFVLEKSLKKNDAVVAIMKDLLDSVKSFENYIKAFFGEGKETNRDESFYGDFVLAYDILLKVDHIYDAIRNYVTQKPYSKDKFKLYFQNPQFMGGWDKDKETDYRATILRYGSKYYLAIMDKKYAKCLQKIDKDDVNGNYEKINYKLLPGPNKMLPKVFFSKKWMAYYNPSEDIQKIYKNGTFKKGDMFNLNDCHKLIDFFKDSISRYPKWSNAYDFNFSETEKYKDIAGFYREVEEQGYKVSFESASKKEVDKLVEEGKLYMFQIYNKDFSDKSHGTPNLHTMYFKLLFDENNHGQIRLSGGAELFMRRASLKKEELVVHPANSPIANKNPDNPKKTTTLSYDVYKDKRFSEDQYELHIPIAINKCPKNIFKINTEVRVLLKHDDNPYVIGIDRGERNLLYIVVVDGKGNIVEQYSLNEIINNFNGIRIKTDYHSLLDKKEKERFEARQNWTSIENIKELKAGYISQVVHKICELVEKYDAVIALEDLNSGFKNSRVKVEKQVYQKFEKMLIDKLNYMVDKKSNPCATGGALKGYQITNKFESFKSMSTQNGFIFYIPAWLTSKIDPSTGFVNLLKTKYTSIADSKKFISSFDRIMYVPEEDLFEFALDYKNFSRTDADYIKKWKLYSYGNRIRIFRNPKKNNVFDWEEVCLTSAYKELFNKYGINYQQGDIRALLCEQSDKAFYSSFMALMSLMLQMRNSITGRTDVDFLISPVKNSDGIFYDSRNYEAQENAILPKNADANGAYNIARKVLWAIGQFKKAEDEKLDKVKIAISNKEWLEYAQTSVKHXPXPXPMVSKGEEDNMAIIKEFMRFKVHMEGSVNGHEFEIEGEGEGRPYEGTQTAKLKVTKGGPLPFAWDILSPQFMYGSKAYVKHPADIPDYLKLSFPEGFKWERVMNFEDGGVVTVTQDSSLQDGEFIYKVKLRGTNFPSDGPVMQKKTMGWEASSERMYPEDGALKGEIKQRLKLKDGGHYDAEVKTTYKAKKPVQLPGAYNVNIKLDITSHNEDYTIVEQYERAEGRHSTGGMDELYK

SEQ ID NO: 230 - protein, 1472 aa, synthetic construct
  REGION 1..1472: note = SYNTHETIC
  VARIANT 1229: note = X can be any naturally occurring amino acid
  VARIANT 1231: note = X can be any naturally occurring amino acid
  VARIANT 1233: note = X can be any naturally occurring amino acid
  VARIANT 1235: note = X can be any naturally occurring amino acid
MSKLEKFTNCYSLSKTLRFKAIPVGKTQENIDNKRLLVEDEKRAEDYKGVKKLLDRYYLSFINDVLHSIKLKNLNNYISLFRKKTRTEKENKELENLEINLRKEIAKAFKGNEGYKSLFKKDIIETILPEFLDDKDEIALVNSFNGFTTAFTGFFDNRENMFSEEAKSTSIAFRCINENLTRYISNMDIFEKVDAIFDKHEVQEIKEKILNSDYDVEDFFEGEFFNFVLTQEGIDVYNAIIGGFVTESGEKIKGLNEYINLYNQKTKQKLPKFKPLYKQVLSDRESLSFYGEGYTSDEEVLEVFRNTLNKNSEIFSSIKKLEKLFKNFDEYSSAGIFVKNGPAISTISKDIFGEWNVIRDKWNAEYDDIHLKKKAVVTEKYEDDRRKSFKKIGSFSLEQLQEYADADLSVVEKLKEIIIQKVDEIYKVYGSSEKLFDADFVLEKSLKKNDAVVAIMKDLLDSVKSFENYIKAFFGEGKETNRDESFYGDFVLAYDILLKVDHIYDAIRNYVTQKPYSKDKFKLYFQNPQFMGGWDKDKETDYRATILRYGSKYYLAIMDKKYAKCLQKIDKDDVNGNYEKINYKLLPGPNKMLPKVFFSKKWMAYYNPSEDIQKIYKNGTFKKGDMFNLNDCHKLIDFFKDSISRYPKWSNAYDFNFSETEKYKDIAGFYREVEEQGYKVSFESASKKEVDKLVEEGKLYMFQIYNKDFSDKSHGTPNLHTMYFKLLFDENNHGQIRLSGGAELFMRRASLKKEELVVHPANSPIANKNPDNPKKTTTLSYDVYKDKRFSEDQYELHIPIAINKCPKNIFKINTEVRVLLKHDDNPYVIGIDRGERNLLYIVVVDGKGNIVEQYSLNEIINNFNGIRIKTDYHSLLDKKEKERFEARQNWTSIENIKELKAGYISQVVHKICELVEKYDAVIALEDLNSGFKNSRVKVEKQVYQKFEKMLIDKLNYMVDKKSNPCATGGALKGYQITNKFESFKSMSTQNGFIFYIPAWLTSKIDPSTGFVNLLKTKYTSIADSKKFISSFDRIMYVPEEDLFEFALDYKNFSRTDADYIKKWKLYSYGNRIRIFRNPKKNNVFDWEEVCLTSAYKELFNKYGINYQQGDIRALLCEQSDKAFYSSFMALMSLMLQMRNSITGRTDVDFLISPVKNSDGIFYDSRNYEAQENAILPKNADANGAYNIARKVLWAIGQFKKAEDEKLDKVKIAISNKEWLEYAQTSVKHXPXPXPXPMVSKGEEDNMAIIKEFMRFKVHMEGSVNGHEFEIEGEGEGRPYEGTQTAKLKVTKGGPLPFAWDILSPQFMYGSKAYVKHPADIPDYLKLSFPEGFKWERVMNFEDGGVVTVTQDSSLQDGEFIYKVKLRGTNFPSDGPVMQKKTMGWEASSERMYPEDGALKGEIKQRLKLKDGGHYDAEVKTTYKAKKPVQLPGAYNVNIKLDITSHNEDYTIVEQYERAEGRHSTGGMDELYK

SEQ ID NO: 231 - protein, 1474 aa, synthetic construct
  REGION 1..1474: note = SYNTHETIC
  VARIANT 1229: note = X can be any naturally occurring amino acid
  VARIANT 1231: note = X can be any naturally occurring amino acid
  VARIANT 1233: note = X can be any naturally occurring amino acid
  VARIANT 1235: note = X can be any naturally occurring amino acid
  VARIANT 1237: note = X can be any naturally occurring amino acid
MSKLEKFTNCYSLSKTLRFKAIPVGKTQENIDNKRLLVEDEKRAEDYKGVKKLLDRYYLSFINDVLHSIKLKNLNNYISLFRKKTRTEKENKELENLEINLRKEIAKAFKGNEGYKSLFKKDIIETILPEFLDDKDEIALVNSFNGFTTAFTGFFDNRENMFSEEAKSTSIAFRCINENLTRYISNMDIFEKVDAIFDKHEVQEIKEKILNSDYDVEDFFEGEFFNFVLTQEGIDVYNAIIGGFVTESGEKIKGLNEYINLYNQKTKQKLPKFKPLYKQVLSDRESLSFYGEGYTSDEEVLEVFRNTLNKNSEIFSSIKKLEKLFKNFDEYSSAGIFVKNGPAISTISKDIFGEWNVIRDKWNAEYDDIHLKKKAVVTEKYEDDRRKSFKKIGSFSLEQLQEYADADLSVVEKLKEIIIQKVDEIYKVYGSSEKLFDADFVLEKSLKKNDAVVAIMKDLLDSVKSFENYIKAFFGEGKETNRDESFYGDFVLAYDILLKVDHIYDAIRNYVTQKPYSKDKFKLYFQNPQFMGGWDKDKETDYRATILRYGSKYYLAIMDKKYAKCLQKIDKDDVNGNYEKINYKLLPGPNKMLPKVFFSKKWMAYYNPSEDIQKIYKNGTFKKGDMFNLNDCHKLIDFFKDSISRYPKWSNAYDFNFSETEKYKDIAGFYREVEEQGYKVSFESASKKEVDKLVEEGKLYMFQIYNKDFSDKSHGTPNLHTMYFKLLFDENNHGQIRLSGGAELFMRRASLKKEELVVHPANSPIANKNPDNPKKTTTLSYDVYKDKRFSEDQYELHIPIAINKCPKNIFKINTEVRVLLKHDDNPYVIGIDRGERNLLYIVVVDGKGNIVEQYSLNEIINNFNGIRIKTDYHSLLDKKEKERFEARQNWTSIENIKELKAGYISQVVHKICELVEKYDAVIALEDLNSGFKNSRVKVEKQVYQKFEKMLIDKLNYMVDKKSNPCATGGALKGYQITNKFESFKSMSTQNGFIFYIPAWLTSKIDPSTGFVNLLKTKYTSIADSKKFISSFDRIMYVPEEDLFEFALDYKNFSRTDADYIKKWKLYSYGNRIRIFRNPKKNNVFDWEEVCLTSAYKELFNKYGINYQQGDIRALLCEQSDKAFYSSFMALMSLMLQMRNSITGRTDVDFLISPVKNSDGIFYDSRNYEAQENAILPKNADANGAYNIARKVLWAIGQFKKAEDEKLDKVKIAISNKEWLEYAQTSVKHXPXPXPXPXPMVSKGEEDNMAIIKEFMRFKVHMEGSVNGHEFEIEGEGEGRPYEGTQTAKLKVTKGGPLPFAWDILSPQFMYGSKAYVKHPADIPDYLKLSFPEGFKWERVMNFEDGGVVTVTQDSSLQDGEFIYKVKLRGTNFPSDGPVMQKKTMGWEASSERMYPEDGALKGEIKQRLKLKDGGHYDAEVKTTYKAKKPVQLPGAYNVNIKLDITSHNEDYTIVEQYERAEGRHSTGGMDELYK

SEQ ID NO: 232 - protein, 1476 aa, synthetic construct
  REGION 1..1476: note = SYNTHETIC
  VARIANT 1229: note = X can be any naturally occurring amino acid
  VARIANT 1231: note = X can be any naturally occurring amino acid
  VARIANT 1233: note = X can be any naturally occurring amino acid
  VARIANT 1235: note = X can be any naturally occurring amino acid
  VARIANT 1237: note = X can be any naturally occurring amino acid
  VARIANT 1239: note = X can be any naturally occurring amino acid
MSKLEKFTNCYSLSKTLRFKAIPVGKTQENIDNKRLLVEDEKRAEDYKGVKKLLDRYYLSFINDVLHSIKLKNLNNYISLFRKKTRTEKENKELENLEINLRKEIAKAFKGNEGYKSLFKKDIIETILPEFLDDKDEIALVNSFNGFTTAFTGFFDNRENMFSEEAKSTSIAFRCINENLTRYISNMDIFEKVDAIFDKHEVQEIKEKILNSDYDVEDFFEGEFFNFVLTQEGIDVYNAIIGGFVTESGEKIKGLNEYINLYNQKTKQKLPKFKPLYKQVLSDRESLSFYGEGYTSDEEVLEVFRNTLNKNSEIFSSIKKLEKLFKNFDEYSSAGIFVKNGPAISTISKDIFGEWNVIRDKWNAEYDDIHLKKKAVVTEKYEDDRRKSFKKIGSFSLEQLQEYADADLSVVEKLKEIIIQKVDEIYKVYGSSEKLFDADFVLEKSLKKNDAVVAIMKDLLDSVKSFENYIKAFFGEGKETNRDESFYGDFVLAYDILLKVDHIYDAIRNYVTQKPYSKDKFKLYFQNPQFMGGWDKDKETDYRATILRYGSKYYLAIMDKKYAKCLQKIDKDDVNGNYEKINYKLLPGPNKMLPKVFFSKKWMAYYNPSEDIQKIYKNGTFKKGDMFNLNDCHKLIDFFKDSISRYPKWSNAYDFNFSETEKYKDIAGFYREVEEQGYKVSFESASKKEVDKLVEEGKLYMFQIYNKDFSDKSHGTPNLHTMYFKLLFDENNHGQIRLSGGAELFMRRASLKKEELVVHPANSPIANKNPDNPKKTTTLSYDVYKDKRFSEDQYELHIPIAINKCPKNIFKINTEVRVLLKHDDNPYVIGIDRGERNLLYIVVVDGKGNIVEQYSLNEIINNFNGIRIKTDYHSLLDKKEKERFEARQNWTSIENIKELKAGYISQVVHKICELVEKYDAVIALEDLNSGFKNSRVKVEKQVYQKFEKMLIDKLNYMVDKKSNPCATGGALKGYQITNKFESFKSMSTQNGFIFYIPAWLTSKIDPSTGFVNLLKTKYTSIADSKKFISSFDRIMYVPEEDLFEFALDYKNFSRTDADYIKKWKLYSYGNRIRIFRNPKKNNVFDWEEVCLTSAYKELFNKYGINYQQGDIRALLCEQSDKAFYSSFMALMSLMLQMRNSITGRTDVDFLISPVKNSDGIFYDSRNYEAQENAILPKNADANGAYNIARKVLWAIGQFKKAEDEKLDKVKIAISNKEWLEYAQTSVKHXPXPXPXPXPXPMVSKGEEDNMAIIKEFMRFKVHMEGSVNGHEFEIEGEGEGRPYEGTQTAKLKVTKGGPLPFAWDILSPQFMYGSKAYVKHPADIPDYLKLSFPEGFKWERVMNFEDGGVVTVTQDSSLQDGEFIYKVKLRGTNFPSDGPVMQKKTMGWEASSERMYPEDGALKGEIKQRLKLKDGGHYDAEVKTTYKAKKPVQLPGAYNVNIKLDITSHNEDYTIVEQYERAEGRHSTGGMDELYK

SEQ ID NO: 233 - protein, 1478 aa, synthetic construct
  REGION 1..1478: note = SYNTHETIC
  VARIANT 1229: note = X can be any naturally occurring amino acid
  VARIANT 1231: note = X can be any naturally occurring amino acid
  VARIANT 1233: note = X can be any naturally occurring amino acid
  VARIANT 1235: note = X can be any naturally occurring amino acid
  VARIANT 1237: note = X can be any naturally occurring amino acid
  VARIANT 1239: note = X can be any naturally occurring amino acid
  VARIANT 1241: note = X can be any naturally occurring amino acid
MSKLEKFTNCYSLSKTLRFKAIPVGKTQENIDNKRLLVEDEKRAEDYKGVKKLLDRYYLSFINDVLHSIKLKNLNNYISLFRKKTRTEKENKELENLEINLRKEIAKAFKGNEGYKSLFKKDIIETILPEFLDDKDEIALVNSFNGFTTAFTGFFDNRENMFSEEAKSTSIAFRCINENLTRYISNMDIFEKVDAIFDKHEVQEIKEKILNSDYDVEDFFEGEFFNFVLTQEGIDVYNAIIGGFVTESGEKIKGLNEYINLYNQKTKQKLPKFKPLYKQVLSDRESLSFYGEGYTSDEEVLEVFRNTLNKNSEIFSSIKKLEKLFKNFDEYSSAGIFVKNGPAISTISKDIFGEWNVIRDKWNAEYDDIHLKKKAVVTEKYEDDRRKSFKKIGSFSLEQLQEYADADLSVVEKLKEIIIQKVDEIYKVYGSSEKLFDADFVLEKSLKKNDAVVAIMKDLLDSVKSFENYIKAFFGEGKETNRDESFYGDFVLAYDILLKVDHIYDAIRNYVTQKPYSKDKFKLYFQNPQFMGGWDKDKETDYRATILRYGSKYYLAIMDKKYAKCLQKIDKDDVNGNYEKINYKLLPGPNKMLPKVFFSKKWMAYYNPSEDIQKIYKNGTFKKGDMFNLNDCHKLIDFFKDSISRYPKWSNAYDFNFSETEKYKDIAGFYREVEEQGYKVSFESASKKEVDKLVEEGKLYMFQIYNKDFSDKSHGTPNLHTMYFKLLFDENNHGQIRLSGGAELFMRRASLKKEELVVHPANSPIANKNPDNPKKTTTLSYDVYKDKRFSEDQYELHIPIAINKCPKNIFKINTEVRVLLKHDDNPYVIGIDRGERNLLYIVVVDGKGNIVEQYSLNEIINNFNGIRIKTDYHSLLDKKEKERFEARQNWTSIENIKELKAGYISQVVHKICELVEKYDAVIALEDLNSGFKNSRVKVEKQVYQKFEKMLIDKLNYMVDKKSNPCATGGALKGYQITNKFESFKSMSTQNGFIFYIPAWLTSKIDPSTGFVNLLKTKYTSIADSKKFISSFDRIMYVPEEDLFEFALDYKNFSRTDADYIKKWKLYSYGNRIRIFRNPKKNNVFDWEEVCLTSAYKELFNKYGINYQQGDIRALLCEQSDKAFYSSFMALMSLMLQMRNSITGRTDVDFLISPVKNSDGIFYDSRNYEAQENAILPKNADANGAYNIARKVLWAIGQFKKAEDEKLDKVKIAISNKEWLEYAQTSVKHXPXPXPXPXPXPXPMVSKGEEDNMAIIKEFMRFKVHMEGSVNGHEFEIEGEGEGRPYEGTQTAKLKVTKGGPLPFAWDILSPQFMYGSKAYVKHPADIPDYLKLSFPEGFKWERVMNFEDGGVVTVTQDSSLQDGEFIYKVKLRGTNFPSDGPVMQKKTMGWEASSERMYPEDGALKGEIKQRLKLKDGGHYDAEVKTTYKAKKPVQLPGAYNVNIKLDITSHNEDYTIVEQYERAEGRHSTGGMDELYK

SEQ ID NO: 234 - protein, 1480 aa, synthetic construct
  REGION 1..1480: note = SYNTHETIC
  VARIANT 1229: note = X can be any naturally occurring amino acid
  VARIANT 1231: note = X can be any naturally occurring amino acid
  VARIANT 1233: note = X can be any naturally occurring amino acid
  VARIANT 1235: note = X can be any naturally occurring amino acid
  VARIANT 1237: note = X can be any naturally occurring amino acid
  VARIANT 1239: note = X can be any naturally occurring amino acid
  VARIANT 1241: note = X can be any naturally occurring amino acid
  VARIANT 1243: note = X can be any naturally occurring amino acid
MSKLEKFTNCYSLSKTLRFKAIPVGKTQENIDNKRLLVEDEKRAEDYKGVKKLLDRYYLSFINDVLHSIKLKNLNNYISLFRKKTRTEKENKELENLEINLRKEIAKAFKGNEGYKSLFKKDIIETILPEFLDDKDEIALVNSFNGFTTAFTGFFDNRENMFSEEAKSTSIAFRCINENLTRYISNMDIFEKVDAIFDKHEVQEIKEKILNSDYDVEDFFEGEFFNFVLTQEGIDVYNAIIGGFVTESGEKIKGLNEYINLYNQKTKQKLPKFKPLYKQVLSDRESLSFYGEGYTSDEEVLEVFRNTLNKNSEIFSSIKKLEKLFKNFDEYSSAGIFVKNGPAISTISKDIFGEWNVIRDKWNAEYDDIHLKKKAVVTEKYEDDRRKSFKKIGSFSLEQLQEYADADLSVVEKLKEIIIQKVDEIYKVYGSSEKLFDADFVLEKSLKKNDAVVAIMKDLLDSVKSFENYIKAFFGEGKETNRDESFYGDFVLAYDILLKVDHIYDAIRNYVTQKPYSKDKFKLYFQNPQFMGGWDKDKETDYRATILRYGSKYYLAIMDKKYAKCLQKIDKDDVNGNYEKINYKLLPGPNKMLPKVFFSKKWMAYYNPSEDIQKIYKNGTFKKGDMFNLNDCHKLIDFFKDSISRYPKWSNAYDFNFSETEKYKDIAGFYREVEEQGYKVSFESASKKEVDKLVEEGKLYMFQIYNKDFSDKSHGTPNLHTMYFKLLFDENNHGQIRLSGGAELFMRRASLKKEELVVHPANSPIANKNPDNPKKTTTLSYDVYKDKRFSEDQYELHIPIAINKCPKNIFKINTEVRVLLKHDDNPYVIGIDRGERNLLYIVVVDGKGNIVEQYSLNEIINNFNGIRIKTDYHSLLDKKEKERFEARQNWTSIENIKELKAGYISQVVHKICELVEKYDAVIALEDLNSGFKNSRVKVEKQVYQKFEKMLIDKLNYMVDKKSNPCATGGALKGYQITNKFESFKSMSTQNGFIFYIPAWLTSKIDPSTGFVNLLKTKYTSIADSKKFISSFDRIMYVPEEDLFEFALDYKNFSRTDADYIKKWKLYSYGNRIRIFRNPKKNNVFDWEEVCLTSAYKELFNKYGINYQQGDIRALLCEQSDKAFYSSFMALMSLMLQMRNSITGRTDVDFLISPVKNSDGIFYDSRNYEAQENAILPKNADANGAYNIARKVLWAIGQFKKAEDEKLDKVKIAISNKEWLEYAQTSVKHXPXPXPXPXPXPXPXPMVSKGEEDNMAIIKEFMRFKVHMEGSVNGHEFEIEGEGEGRPYEGTQTAKLKVTKGGPLPFAWDILSPQFMYGSKAYVKHPADIPDYLKLSFPEGFKWERVMNFEDGGVVTVTQDSSLQDGEFIYKVKLRGTNFPSDGPVMQKKTMGWEASSERMYPEDGALKGEIKQRLKLKDGGHYDAEVKTTYKAKKPVQLPGAYNVNIKLDITSHNEDYTIVEQYERAEGRHSTGGMDELYK

SEQ ID NO: 235 - protein, 1482 aa, synthetic construct
  REGION 1..1482: note = SYNTHETIC
  VARIANT 1229: note = X can be any naturally occurring amino acid
  VARIANT 1231: note = X can be any naturally occurring amino acid
  VARIANT 1233: note = X can be any naturally occurring amino acid
  VARIANT 1235: note = X can be any naturally occurring amino acid
  VARIANT 1237: note = X can be any naturally occurring amino acid
  VARIANT 1239: note = X can be any naturally occurring amino acid
  VARIANT 1241: note = X can be any naturally occurring amino acid
  VARIANT 1243: note = X can be any naturally occurring amino acid
  VARIANT 1245: note = X can be any naturally occurring amino acid
MSKLEKFTNCYSLSKTLRFKAIPVGKTQENIDNKRLLVEDEKRAEDYKGVKKLLDRYYLSFINDVLHSIKLKNLNNYISLFRKKTRTEKENKELENLEINLRKEIAKAFKGNEGYKSLFKKDIIETILPEFLDDKDEIALVNSFNGFTTAFTGFFDNRENMFSEEAKSTSIAFRCINENLTRYISNMDIFEKVDAIFDKHEVQEIKEKILNSDYDVEDFFEGEFFNFVLTQEGIDVYNAIIGGFVTESGEKIKGLNEYINLYNQKTKQKLPKFKPLYKQVLSDRESLSFYGEGYTSDEEVLEVFRNTLNKNSEIFSSIKKLEKLFKNFDEYSSAGIFVKNGPAISTISKDIFGEWNVIRDKWNAEYDDIHLKKKAVVTEKYEDDRRKSFKKIGSFSLEQLQEYADADLSVVEKLKEIIIQKVDEIYKVYGSSEKLFDADFVLEKSLKKNDAVVAIMKDLLDSVKSFENYIKAFFGEGKETNRDESFYGDFVLAYDILLKVDHIYDAIRNYVTQKPYSKDKFKLYFQNPQFMGGWDKDKETDYRATILRYGSKYYLAIMDKKYAKCLQKIDKDDVNGNYEKINYKLLPGPNKMLPKVFFSKKWMAYYNPSEDIQKIYKNGTFKKGDMFNLNDCHKLIDFFKDSISRYPKWSNAYDFNFSETEKYKDIAGFYREVEEQGYKVSFESASKKEVDKLVEEGKLYMFQIYNKDFSDKSHGTPNLHTMYFKLLFDENNHGQIRLSGGAELFMRRASLKKEELVVHPANSPIANKNPDNPKKTTTLSYDVYKDKRFSEDQYELHIPIAINKCPKNIFKINTEVRVLLKHDDNPYVIGIDRGERNLLYIVVVDGKGNIVEQYSLNEIINNFNGIRIKTDYHSLLDKKEKERFEARQNWTSIENIKELKAGYISQVVHKICELVEKYDAVIALEDLNSGFKNSRVKVEKQVYQKFEKMLIDKLNYMVDKKSNPCATGGALKGYQITNKFESFKSMSTQNGFIFYIPAWLTSKIDPSTGFVNLLKTKYTSIADSKKFISSFDRIMYVPEEDLFEFALDYKNFSRTDADYIKKWKLYSYGNRIRIFRNPKKNNVFDWEEVCLTSAYKELFNKYGINYQQGDIRALLCEQSDKAFYSSFMALMSLMLQMRNSITGRTDVDFLISPVKNSDGIFYDSRNYEAQENAILPKNADANGAYNIARKVLWAIGQFKKAEDEKLDKVKIAISNKEWLEYAQTSVKHXPXPXPXPXPXPXPXPXPMVSKGEEDNMAIIKEFMRFKVHMEGSVNGHEFEIEGEGEGRPYEGTQTAKLKVTKGGPLPFAWDILSPQFMYGSKAYVKHPADIPDYLKLSFPEGFKWERVMNFEDGGVVTVTQDSSLQDGEFIYKVKLRGTNFPSDGPVMQKKTMGWEASSERMYPEDGALKGEIKQRLKLKDGGHYDAEVKTTYKAKKPVQLPGAYNVNIKLDITSHNEDYTIVEQYERAEGRHSTGGMDELYK

SEQ ID NO: 236 - protein, 1484 aa, synthetic construct
  REGION 1..1484: note = SYNTHETIC
  VARIANT 1229: note = X can be any naturally occurring amino acid
  VARIANT 1231: note = X can be any naturally occurring amino acid
  VARIANT 1233: note = X can be any naturally occurring amino acid
  VARIANT 1235: note = X can be any naturally occurring amino acid
  VARIANT 1237: note = X can be any naturally occurring amino acid
  VARIANT 1239: note = X can be any naturally occurring amino acid
  VARIANT 1241: note = X can be any naturally occurring amino acid
  VARIANT 1243: note = X can be any naturally occurring amino acid
  VARIANT 1245: note = X can be any naturally occurring amino acid
  VARIANT 1247: note = X can be any naturally occurring amino acid
MSKLEKFTNCYSLSKTLRFKAIPVGKTQENIDNKRLLVEDEKRAEDYKGVKKLLDRYYLSFINDVLHSIKLKNLNNYISLFRKKTRTEKENKELENLEINLRKEIAKAFKGNEGYKSLFKKDIIETILPEFLDDKDEIALVNSFNGFTTAFTGFFDNRENMFSEEAKSTSIAFRCINENLTRYISNMDIFEKVDAIFDKHEVQEIKEKILNSDYDVEDFFEGEFFNFVLTQEGIDVYNAIIGGFVTESGEKIKGLNEYINLYNQKTKQKLPKFKPLYKQVLSDRESLSFYGEGYTSDEEVLEVFRNTLNKNSEIFSSIKKLEKLFKNFDEYSSAGIFVKNGPAISTISKDIFGEWNVIRDKWNAEYDDIHLKKKAVVTEKYEDDRRKSFKKIGSFSLEQLQEYADADLSVVEKLKEIIIQKVDEIYKVYGSSEKLFDADFVLEKSLKKNDAVVAIMKDLLDSVKSFENYIKAFFGEGKETNRDESFYGDFVLAYDILLKVDHIYDAIRNYVTQKPYSKDKFKLYFQNPQFMGGWDKDKETDYRATILRYGSKYYLAIMDKKYAKCLQKIDKDDVNGNYEKINYKLLPGPNKMLPKVFFSKKWMAYYNPSEDIQKIYKNGTFKKGDMFNLNDCHKLIDFFKDSISRYPKWSNAYDFNFSETEKYKDIAGFYREVEEQGYKVSFESASKKEVDKLVEEGKLYMFQIYNKDFSDKSHGTPNLHTMYFKLLFDENNHGQIRLSGGAELFMRRASLKKEELVVHPANSPIANKNPDNPKKTTTLSYDVYKDKRFSEDQYELHIPIAINKCPKNIFKINTEVRVLLKHDDNPYVIGIDRGERNLLYIVVVDGKGNIVEQYSLNEIINNFNGIRIKTDYHSLLDKKEKERFEARQNWTSIENIKELKAGYISQVVHKICELVEKYDAVIALEDLNSGFKNSRVKVEKQVYQKFEKMLIDKLNYMVDKKSNPCATGGALKGYQITNKFESFKSMSTQNGFIFYIPAWLTSKIDPSTGFVNLLKTKYTSIADSKKFISSFDRIMYVPEEDLFEFALDYKNFSRTDADYIKKWKLYSYGNRIRIFRNPKKNNVFDWEEVCLTSAYKELFNKYGINYQQGDIRALLCEQSDKAFYSSFMALMSLMLQMRNSITGRTDVDFLISPVKNSDGIFYDSRNYEAQENAILPKNADANGAYNIARKVLWAIGQFKKAEDEKLDKVKIAISNKEWLEYAQTSVKHXPXPXPXPXPXPXPXPXPXPMVSKGEEDNMAIIKEFMRFKVHMEGSVNGHEFEIEGEGEGRPYEGTQTAKLKVTKGGPLPFAWDILSPQFMYGSKAYVKHPADIPDYLKLSFPEGFKWERVMNFEDGGVVTVTQDSSLQDGEFIYKVKLRGTNFPSDGPVMQKKTMGWEASSERMYPEDGALKGEIKQRLKLKDGGHYDAEVKTTYKAKKPVQLPGAYNVNIKLDITSHNEDYTIVEQYERAEGRHSTGGMDELYK

SEQ ID NO: 237 - protein, 1486 aa, synthetic construct
  REGION 1..1486: note = SYNTHETIC
  VARIANT 1229: note = X can be any naturally occurring amino acid
  VARIANT 1231: note = X can be any naturally occurring amino acid
  VARIANT 1233: note = X can be any naturally occurring amino acid
  VARIANT 1235: note = X can be any naturally occurring amino acid
  VARIANT 1237: note = X can be any naturally occurring amino acid
  VARIANT 1239: note = X can be any naturally occurring amino acid
  VARIANT 1241: note = X can be any naturally occurring amino acid
  VARIANT 1243: note = X can be any naturally occurring amino acid
  VARIANT 1245: note = X can be any naturally occurring amino acid
  VARIANT 1247: note = X can be any naturally occurring amino acid
  VARIANT 1249: note = X can be any naturally occurring amino acid
MSKLEKFTNCYSLSKTLRFKAIPVGKTQENIDNKRLLVEDEKRAEDYKGVKKLLDRYYLSFINDVLHSIKLKNLNNYISLFRKKTRTEKENKELENLEINLRKEIAKAFKGNEGYKSLFKKDIIETILPEFLDDKDEIALVNSFNGFTTAFTGFFDNRENMFSEEAKSTSIAFRCINENLTRYISNMDIFEKVDAIFDKHEVQEIKEKILNSDYDVEDFFEGEFFNFVLTQEGIDVYNAIIGGFVTESGEKIKGLNEYINLYNQKTKQKLPKFKPLYKQVLSDRESLSFYGEGYTSDEEVLEVFRNTLNKNSEIFSSIKKLEKLFKNFDEYSSAGIFVKNGPAISTISKDIFGEWNVIRDKWNAEYDDIHLKKKAVVTEKYEDDRRKSFKKIGSFSLEQLQEYADADLSVVEKLKEIIIQKVDEIYKVYGSSEKLFDADFVLEKSLKKNDAVVAIMKDLLDSVKSFENYIKAFFGEGKETNRDESFYGDFVLAYDILLKVDHIYDAIRNYVTQKPYSKDKFKLYFQNPQFMGGWDKDKETDYRATILRYGSKYYLAIMDKKYAKCLQKIDKDDVNGNYEKINYKLLPGPNKMLPKVFFSKKWMAYYNPSEDIQKIYKNGTFKKGDMFNLNDCHKLIDFFKDSISRYPKWSNAYDFNFSETEKYKDIAGFYREVEEQGYKVSFESASKKEVDKLVEEGKLYMFQIYNKDFSDKSHGTPNLHTMYFKLLFDENNHGQIRLSGGAELFMRRASLKKEELVVHPANSPIANKNPDNPKKTTTLSYDVYKDKRFSEDQYELHIPIAINKCPKNIFKINTEVRVLLKHDDNPYVIGIDRGERNLLYIVVVDGKGNIVEQYSLNEIINNFNGIRIKTDYHSLLDKKEKERFEARQNWTSIENIKELKAGYISQVVHKICELVEKYDAVIALEDLNSGFKNSRVKVEKQVYQKFEKMLIDKLNYMVDKKSNPCATGGALKGYQITNKFESFKSMSTQNGFIFYIPAWLTSKIDPSTGFVNLLKTKYTSIADSKKFISSFDRIMYVPEEDLFEFALDYKNFSRTDADYIKKWKLYSYGNRIRIFRNPKKNNVFDWEEVCLTSAYKELFNKYGINYQQGDIRALLCEQSDKAFYSSFMALMSLMLQMRNSITGRTDVDFLISPVKNSDGIFYDSRNYEAQENAILPKNADANGAYNIARKVLWAIGQFKKAEDEKLDKVKIAISNKEWLEYAQTSVKHXPXPXPXPXPXPXPXPXPXPXPMVSKGEEDNMAIIKEFMRFKVHMEGSVNGHEFEIEGEGEGRPYEGTQTAKLKVTKGGPLPFAWDILSPQFMYGSKAYVKHPADIPDYLKLSFPEGFKWERVMNFEDGGVVTVTQDSSLQDGEFIYKVKLRGTNFPSDGPVMQKKTMGWEASSERMYPEDGALKGEIKQRLKLKDGGHYDAEVKTTYKAKKPVQLPGAYNVNIKLDITSHNEDYTIVEQYERAEGRHSTGGMDELYK

SEQ ID NO: 238 - protein, 1488 aa, synthetic construct
  REGION 1..1488: note = SYNTHETIC
  VARIANT 1229: note = X can be any naturally occurring amino acid
  VARIANT 1231: note = X can be any naturally occurring amino acid
  VARIANT 1233: note = X can be any naturally occurring amino acid
  VARIANT 1235: note = X can be any naturally occurring amino acid
  VARIANT 1237: note = X can be any naturally occurring amino acid
  VARIANT 1239: note = X can be any naturally occurring amino acid
  VARIANT 1241: note = X can be any naturally occurring amino acid
  VARIANT 1243: note = X can be any naturally occurring amino acid
  VARIANT 1245: note = X can be any naturally occurring amino acid
  VARIANT 1247: note = X can be any naturally occurring amino acid
  VARIANT 1249: note = X can be any naturally occurring amino acid
  VARIANT 1251: note = X can be any naturally occurring amino acid
MSKLEKFTNCYSLSKTLRFKAIPVGKTQENIDNKRLLVEDEKRAEDYKGVKKLLDRYYLSFINDVLHSIKLKNLNNYISLFRKKTRTEKENKELENLEINLRKEIAKAFKGNEGYKSLFKKDIIETILPEFLDDKDEIALVNSFNGFTTAFTGFFDNRENMFSEEAKSTSIAFRCINENLTRYISNMDIFEKVDAIFDKHEVQEIKEKILNSDYDVEDFFEGEFFNFVLTQEGIDVYNAIIGGFVTESGEKIKGLNEYINLYNQKTKQKLPKFKPLYKQVLSDRESLSFYGEGYTSDEEVLEVFRNTLNKNSEIFSSIKKLEKLFKNFDEYSSAGIFVKNGPAISTISKDIFGEWNVIRDKWNAEYDDIHLKKKAVVTEKYEDDRRKSFKKIGSFSLEQLQEYADADLSVVEKLKEIIIQKVDEIYKVYGSSEKLFDADFVLEKSLKKNDAVVAIMKDLLDSVKSFENYIKAFFGEGKETNRDESFYGDFVLAYDILLKVDHIYDAIRNYVTQKPYSKDKFKLYFQNPQFMGGWDKDKETDYRATILRYGSKYYLAIMDKKYAKCLQKIDKDDVNGNYEKINYKLLPGPNKMLPKVFFSKKWMAYYNPSEDIQKIYKNGTFKKGDMFNLNDCHKLIDFFKDSISRYPKWSNAYDFNFSETEKYKDIAGFYREVEEQGYKVSFESASKKEVDKLVEEGKLYMFQIYNKDFSDKSHGTPNLHTMYFKLLFDENNHGQIRLSGGAELFMRRASLKKEELVVHPANSPIANKNPDNPKKTTTLSYDVYKDKRFSEDQYELHIPIAINKCPKNIFKINTEVRVLLKHDDNPYVIGIDRGERNLLYIVVVDGKGNIVEQYSLNEIINNFNGIRIKTDYHSLLDKKEKERFEARQNWTSIENIKELKAGYISQVVHKICELVEKYDAVIALEDLNSGFKNSRVKVEKQVYQKFEKMLIDKLNYMVDKKSNPCATGGALKGYQITNKFESFKSMSTQNGFIFYIPAWLTSKIDPSTGFVNLLKTKYTSIADSKKFISSFDRIMYVPEEDLFEFALDYKNFSRTDADYIKKWKLYSYGNRIRIFRNPKKNNVFDWEEVCLTSAYKELFNKYGINYQQGDIRALLCEQSDKAFYSSFMALMSLMLQMRNSITGRTDVDFLISPVKNSDGIFYDSRNYEAQENAILPKNADANGAYNIARKVLWAIGQFKKAEDEKLDKVKIAISNKEWLEYAQTSVKHXPXPXPXPXPXPXPXPXPXPXPXPMVSKGEEDNMAIIKEFMRFKVHMEGSVNGHEFEIEGEGEGRPYEGTQTAKLKVTKGGPLPFAWDILSPQFMYGSKAYVKHPADIPDYLKLSFPEGFKWERVMNFEDGGVVTVTQDSSLQDGEFIYKVKLRGTNFPSDGPVMQKKTMGWEASSERMYPEDGALKGEIKQRLKLKDGGHYDAEVKTTYKAKKPVQLPGAYNVNIKLDITSHNEDYTIVEQYERAEGRHSTGGMDELYK

SEQ ID NO: 239 - protein, 1490 aa, synthetic construct
  REGION 1..1490: note = SYNTHETIC
  VARIANT 1229: note = X can be any naturally occurring amino acid
  VARIANT 1231: note = X can be any naturally occurring amino acid
  VARIANT 1233: note = X can be any naturally occurring amino acid
  VARIANT 1235: note = X can be any naturally occurring amino acid
  VARIANT 1237: note = X can be any naturally occurring amino acid
  VARIANT 1239: note = X can be any naturally occurring amino acid
  VARIANT 1241: note = X can be any naturally occurring amino acid
  VARIANT 1243: note = X can be any naturally occurring amino acid
  VARIANT 1245: note = X can be any naturally occurring amino acid
  VARIANT 1247: note = X can be any naturally occurring amino acid
  VARIANT 1249: note = X can be any naturally occurring amino acid
  VARIANT 1251: note = X can be any naturally occurring amino acid
  VARIANT 1253: note = X can be any naturally occurring amino acid
MSKLEKFTNCYSLSKTLRFKAIPVGKTQENIDNKRLLVEDEKRAEDYKGVKKLLDRYYLSFINDVLHSIKLKNLNNYISLFRKKTRTEKENKELENLEINLRKEIAKAFKGNEGYKSLFKKDIIETILPEFLDDKDEIALVNSFNGFTTAFTGFFDNRENMFSEEAKSTSIAFRCINENLTRYISNMDIFEKVDAIFDKHEVQEIKEKILNSDYDVEDFFEGEFFNFVLTQEGIDVYNAIIGGFVTESGEKIKGLNEYINLYNQKTKQKLPKFKPLYKQVLSDRESLSFYGEGYTSDEEVLEVFRNTLNKNSEIFSSIKKLEKLFKNFDEYSSAGIFVKNGPAISTISKDIFGEWNVIRDKWNAEYDDIHLKKKAVVTEKYEDDRRKSFKKIGSFSLEQLQEYADADLSVVEKLKEIIIQKVDEIYKVYGSSEKLFDADFVLEKSLKKNDAVVAIMKDLLDSVKSFENYIKAFFGEGKETNRDESFYGDFVLAYDILLKVDHIYDAIRNYVTQKPYSKDKFKLYFQNPQFMGGWDKDKETDYRATILRYGSKYYLAIMDKKYAKCLQKIDKDDVNGNYEKINYKLLPGPNKMLPKVFFSKKWMAYYNPSEDIQKIYKNGTFKKGDMFNLNDCHKLIDFFKDSISRYPKWSNAYDFNFSETEKYKDIAGFYREVEEQGYKVSFESASKKEVDKLVEEGKLYMFQIYNKDFSDKSHGTPNLHTMYFKLLFDENNHGQIRLSGGAELFMRRASLKKEELVVHPANSPIANKNPDNPKKTTTLSYDVYKDKRFSEDQYELHIPIAINKCPKNIFKINTEVRVLLKHDDNPYVIGIDRGERNLLYIVVVDGKGNIVEQYSLNEIINNFNGIRIKTDYHSLLDKKEKERFEARQNWTSIENIKELKAGYISQVVHKICELVEKYDAVIALEDLNSGFKNSRVKVEKQVYQKFEKMLIDKLNYMVDKKSNPCATGGALKGYQITNKFESFKSMSTQNGFIFYIPAWLTSKIDPSTGFVNLLKTKYTSIADSKKFISSFDRIMYVPEEDLFEFALDYKNFSRTDADYIKKWKLYSYGNRIRIFRNPKKNNVFDWEEVCLTSAYKELFNKYGINYQQGDIRALLCEQSDKAFYSSFMALMSLMLQMRNSITGRTDVDFLISPVKNSDGIFYDSRNYEAQENAILPKNADANGAYNIARKVLWAIGQFKKAEDEKLDKVKIAISNKEWLEYAQTSVKHXPXPXPXPXPXPXPXPXPXPXPXPXPMVSKGEEDNMAIIKEFMRFKVHMEGSVNGHEFEIEGEGEGRPYEGTQTAKLKVTKGGPLPFAWDILSPQFMYGSKAYVKHPADIPDYLKLSFPEGFKWERVMNFEDGGVVTVTQDSSLQDGEFIYKVKLRGTNFPSDGPVMQKKTMGWEASSERMYPEDGALKGEIKQRLKLKDGGHYDAEVKTTYKAKKPVQLPGAYNVNIKLDITSHNEDYTIVEQYERAEGRHSTGGMDELYK

SEQ ID NO: 240 - protein, 1492 aa, synthetic construct
  REGION 1..1492: note = SYNTHETIC
  VARIANT 1229: note = X can be any naturally occurring amino acid
  VARIANT 1231: note = X can be any naturally occurring amino acid
  VARIANT 1233: note = X can be any naturally occurring amino acid
  VARIANT 1235: note = X can be any naturally occurring amino acid
  VARIANT 1237: note = X can be any naturally occurring amino acid
  VARIANT 1239: note = X can be any naturally occurring amino acid
  VARIANT 1241: note = X can be any naturally occurring amino acid
  VARIANT 1243: note = X can be any naturally occurring amino acid
  VARIANT 1245: note = X can be any naturally occurring amino acid
  VARIANT 1247: note = X can be any naturally occurring amino acid
  VARIANT 1249: note = X can be any naturally occurring amino acid
  VARIANT 1251: note = X can be any naturally occurring amino acid
  VARIANT 1253: note = X can be any naturally occurring amino acid
  VARIANT 1255: note = X can be any naturally occurring amino acid
MSKLEKFTNCYSLSKTLRFKAIPVGKTQENIDNKRLLVEDEKRAEDYKGVKKLLDRYYLSFINDVLHSIKLKNLNNYISLFRKKTRTEKENKELENLEINLRKEIAKAFKGNEGYKSLFKKDIIETILPEFLDDKDEIALVNSFNGFTTAFTGFFDNRENMFSEEAKSTSIAFRCINENLTRYISNMDIFEKVDAIFDKHEVQEIKEKILNSDYDVEDFFEGEFFNFVLTQEGIDVYNAIIGGFVTESGEKIKGLNEYINLYNQKTKQKLPKFKPLYKQVLSDRESLSFYGEGYTSDEEVLEVFRNTLNKNSEIFSSIKKLEKLFKNFDEYSSAGIFVKNGPAISTISKDIFGEWNVIRDKWNAEYDDIHLKKKAVVTEKYEDDRRKSFKKIGSFSLEQLQEYADADLSVVEKLKEIIIQKVDEIYKVYGSSEKLFDADFVLEKSLKKNDAVVAIMKDLLDSVKSFENYIKAFFGEGKETNRDESFYGDFVLAYDILLKVDHIYDAIRNYVTQKPYSKDKFKLYFQNPQFMGGWDKDKETDYRATILRYGSKYYLAIMDKKYAKCLQKIDKDDVNGNYEKINYKLLPGPNKMLPKVFFSKKWMAYYNPSEDIQKIYKNGTFKKGDMFNLNDCHKLIDFFKDSISRYPKWSNAYDFNFSETEKYKDIAGFYREVEEQGYKVSFESASKKEVDKLVEEGKLYMFQIYNKDFSDKSHGTPNLHTMYFKLLFDENNHGQIRLSGGAELFMRRASLKKEELVVHPANSPIANKNPDNPKKTTTLSYDVYKDKRFSEDQYELHIPIAINKCPKNIFKINTEVRVLLKHDDNPYVIGIDRGERNLLYIVVVDGKGNIVEQYSLNEIINNFNGIRIKTDYHSLLDKKEKERFEARQNWTSIENIKELKAGYISQVVHKICELVEKYDAVIALEDLNSGFKNSRVKVEKQVYQKFEKMLIDKLNYMVDKKSNPCATGGALKGYQITNKFESFKSMSTQNGFIFYIPAWLTSKIDPSTGFVNLLKTKYTSIADSKKFISSFDRIMYVPEEDLFEFALDYKNFSRTDADYIKKWKLYSYGNRIRIFRNPKKNNVFDWEEVCLTSAYKELFNKYGINYQQGDIRALLCEQSDKAFYSSFMALMSLMLQMRNSITGRTDVDFLISPVKNSDGIFYDSRNYEAQENAILPKNADANGAYNIARKVLWAIGQFKKAEDEKLDKVKIAISNKEWLEYAQTSVKHXPXPXPXPXPXPXPXPXPXPXPXPXPXPMVSKGEEDNMAIIKEFMRFKVHMEGSVNGHEFEIEGEGEGRPYEGTQTAKLKVTKGGPLPFAWDILSPQFMYGSKAYVKHPADIPDYLKLSFPEGFKWERVMNFEDGGVVTVTQDSSLQDGEFIYKVKLRGTNFPSDGPVMQKKTMGWEASSERMYPEDGALKGEIKQRLKLKDGGHYDAEVKTTYKAKKPVQLPGAYNVNIKLDITSHNEDYTIVEQYERAEGRHSTGGMDELYK

SEQ ID NO: 241 - protein, 1479 aa, synthetic construct
  REGION 1..1479: note = SYNTHETIC
MSKLEKFTNCYSLSKTLRFKAIPVGKTQENIDNKRLLVEDEKRAEDYKGVKKLLDRYYLSFINDVLHSIKLKNLNNYISLFRKKTRTEKENKELENLEINLRKEIAKAFKGNEGYKSLFKKDIIETILPEFLDDKDEIALVNSFNGFTTAFTGFFDNRENMFSEEAKSTSIAFRCINENLTRYISNMDIFEKVDAIFDKHEVQEIKEKILNSDYDVEDFFEGEFFNFVLTQEGIDVYNAIIGGFVTESGEKIKGLNEYINLYNQKTKQKLPKFKPLYKQVLSDRESLSFYGEGYTSDEEVLEVFRNTLNKNSEIFSSIKKLEKLFKNFDEYSSAGIFVKNGPAISTISKDIFGEWNVIRDKWNAEYDDIHLKKKAVVTEKYEDDRRKSFKKIGSFSLEQLQEYADADLSVVEKLKEIIIQKVDEIYKVYGSSEKLFDADFVLEKSLKKNDAVVAIMKDLLDSVKSFENYIKAFFGEGKETNRDESFYGDFVLAYDILLKVDHIYDAIRNYVTQKPYSKDKFKLYFQNPQFMGGWDKDKETDYRATILRYGSKYYLAIMDKKYAKCLQKIDKDDVNGNYEKINYKLLPGPNKMLPKVFFSKKWMAYYNPSEDIQKIYKNGTFKKGDMFNLNDCHKLIDFFKDSISRYPKWSNAYDFNFSETEKYKDIAGFYREVEEQGYKVSFESASKKEVDKLVEEGKLYMFQIYNKDFSDKSHGTPNLHTMYFKLLFDENNHGQIRLSGGAELFMRRASLKKEELVVHPANSPIANKNPDNPKKTTTLSYDVYKDKRFSEDQYELHIPIAINKCPKNIFKINTEVRVLLKHDDNPYVIGIDRGERNLLYIVVVDGKGNIVEQYSLNEIINNFNGIRIKTDYHSLLDKKEKERFEARQNWTSIENIKELKAGYISQVVHKICELVEKYDAVIALEDLNSGFKNSRVKVEKQVYQKFEKMLIDKLNYMVDKKSNPCATGGALKGYQITNKFESFKSMSTQNGFIFYIPAWLTSKIDPSTGFVNLLKTKYTSIADSKKFISSFDRIMYVPEEDLFEFALDYKNFSRTDADYIKKWKLYSYGNRIRIFRNPKKNNVFDWEEVCLTSAYKELFNKYGINYQQGDIRALLCEQSDKAFYSSFMALMSLMLQMRNSITGRTDVDFLISPVKNSDGIFYDSRNYEAQENAILPKNADANGAYNIARKVLWAIGQFKKAEDEKLDKVKIAISNKEWLEYAQTSVKHGGGGSEAAAKGGGGSMVSKGEEDNMAIIKEFMRFKVHMEGSVNGHEFEIEGEGEGRPYEGTQTAKLKVTKGGPLPFAWDILSPQFMYGSKAYVKHPADIPDYLKLSFPEGFKWERVMNFEDGGVVTVTQDSSLQDGEFIYKVKLRGTNFPSDGPVMQKKTMGWEASSERMYPEDGALKGEIKQRLKLKDGGHYDAEVKTTYKAKKPVQLPGAYNVNIKLDITSHNEDYTIVEQYERAEGRHSTGGMDELYK

SEQ ID NO: 242 - protein, 1479 aa, synthetic construct
  REGION 1..1479: note = SYNTHETIC
MSKLEKFTNCYSLSKTLRFKAIPVGKTQENIDNKRLLVEDEKRAEDYKGVKKLLDRYYLSFINDVLHSIKLKNLNNYISLFRKKTRTEKENKELENLEINLRKEIAKAFKGNEGYKSLFKKDIIETILPEFLDDKDEIALVNSFNGFTTAFTGFFDNRENMFSEEAKSTSIAFRCINENLTRYISNMDIFEKVDAIFDKHEVQEIKEKILNSDYDVEDFFEGEFFNFVLTQEGIDVYNAIIGGFVTESGEKIKGLNEYINLYNQKTKQKLPKFKPLYKQVLSDRESLSFYGEGYTSDEEVLEVFRNTLNKNSEIFSSIKKLEKLFKNFDEYSSAGIFVKNGPAISTISKDIFGEWNVIRDKWNAEYDDIHLKKKAVVTEKYEDDRRKSFKKIGSFSLEQLQEYADADLSVVEKLKEIIIQKVDEIYKVYGSSEKLFDADFVLEKSLKKNDAVVAIMKDLLDSVKSFENYIKAFFGEGKETNRDESFYGDFVLAYDILLKVDHIYDAIRNYVTQKPYSKDKFKLYFQNPQFMGGWDKDKETDYRATILRYGSKYYLAIMDKKYAKCLQKIDKDDVNGNYEKINYKLLPGPNKMLPKVFFSKKWMAYYNPSEDIQKIYKNGTFKKGDMFNLNDCHKLIDFFKDSISRYPKWSNAYDFNFSETEKYKDIAGFYREVEEQGYKVSFESASKKEVDKLVEEGKLYMFQIYNKDFSDKSHGTPNLHTMYFKLLFDENNHGQIRLSGGAELFMRRASLKKEELVVHPANSPIANKNPDNPKKTTTLSYDVYKDKRFSEDQYLLHIPIAINKCPKNIFKINTEVRVLLKHDDNPYVIGIDRGERNLLYIVVVDGKGNIVEQYSLNEIINNFNGIRIKTDYHSLLDKKEKERFEARQNWTSIENIKELKAGYISQVVHKICELVEKYDAVIALEDLNSGFKNSRVKVEKQVYQKFEKMLIDKLNYMVDKKSNPCATGGALKGYQITNKFESFKSMSTQNGFIFYIPAWLTSKIDPSTGFVNLLKTKYTSIADSKKFISSFDRIMYVPEEDLFEFALDYKNFSRTDADYIKKWKLYSYGNRIRIFRNPKKNNVFDWEEVCLTSAYKELFNKYGINYQQGDIRALLCEQSDKAFYSSFMALMSLMLQMRNSITGRTDVDFLISPVKNSDGIFYDSRNYEAQENAILPKNADANGAYNIARKVLWAIGQFKKAEDEKLDKVKIAISNKEWLEYAQTSVKHGSAGSAAGSGEFMVSKGEELFTGVVPILVELDGDVNGHKFSVSGEGEGDATYGKLTLKFICTTGKLPVPWPTLVTTLTYGVQCFSRYPDHMKQHDFFKSAMPEGYVQERTIFFKDDGNYKTRAEVKFEGDTLVNRIELKGIDFKEDGNILGHKLEYNYNSHNVYIMADKQKNGIKVNFKIRHNIEDGSVQLADHYQQNTPIGDGPVLLPDNHYLSTQSALSKDPNEKRDHMVLLEFVTAAGITLGMDELYK

SEQ ID NO: 243 - protein, 1487 aa, synthetic construct
  REGION 1..1487: note = SYNTHETIC
MSKLEKFTNCYSLSKTLRFKAIPVGKTQENIDNKRLLVEDEKRAEDYKGVKKLLDRYYLSFINDVLHSIKLKNLNNYISLFRKKTRTEKENKELENLEINLRKEIAKAFKGNEGYKSLFKKDIIETILPEFLDDKDEIALVNSFNGFTTAFTGFFDNRENMFSEEAKSTSIAFRCINENLTRYISNMDIFEKVDAIFDKHEVQEIKEKILNSDYDVEDFFEGEFFNFVLTQEGIDVYNAIIGGFVTESGEKIKGLNEYINLYNQKTKQKLPKFKPLYKQVLSDRESLSFYGEGYTSDEEVLEVFRNTLNKNSEIFSSIKKLEKLFKNFDEYSSAGIFVKNGPAISTISKDIFGEWNVIRDKWNAEYDDIHLKKKAVVTEKYEDDRRKSFKKIGSFSLEQLQEYADADLSVVEKLKEIIIQKVDEIYKVYGSSEKLFDADFVLEKSLKKNDAVVAIMKDLLDSVKSFENYIKAFFGEGKETNRDESFYGDFVLAYDILLKVDHIYDAIRNYVTQKPYSKDKFKLYFQNPQFMGGWDKDKETDYRATILRYGSKYYLAIMDKKYAKCLQKIDKDDVNGNYEKINYKLLPGPNKMLPKVFFSKKWMAYYNPSEDIQKIYKNGTFKKGDMFNLNDCHKLIDFFKDSISRYPKWSNAYDFNFSETEKYKDIAGFYREVEEQGYKVSFESASKKEVDKLVEEGKLYMFQIYNKDFSDKSHGTPNLHTMYFKLLFDENNHGQIRLSGGAELFMRRASLKKEELVVHPANSPIANKNPDNPKKTTTLSYDVYKDKRFSEDQYLLHIPIAINKCPKNIFKINTEVRVLLKHDDNPYVIGIDRGERNLLYIVVVDGKGNIVEQYSLNEIINNFNGIRIKTDYHSLLDKKEKERFEARQNWTSIENIKELKAGYISQVVHKICELVEKYDAVIALEDLNSGFKNSRVKVEKQVYQKFEKMLIDKLNYMVDKKSNPCATGGALKGYQITNKFESFKSMSTQNGFIFYIPAWLTSKIDPSTGFVNLLKTKYTSIADSKKFISSFDRIMYVPEEDLFEFALDYKNFSRTDADYIKKWKLYSYGNRIRIFRNPKKNNVFDWEEVCLTSAYKELFNKYGINYQQGDIRALLCEQSDKAFYSSFMALMSLMLQMRNSITGRTDVDFLISPVKNSDGIFYDSRNYEAQENAILPKNADANGAYNIARKVLWAIGQFKKAEDEKLDKVKIAISNKEWLEYAQTSVKHGGGGSGGGGSGGGGSGGGGSMVSKGEELFTGVVPILVELDGDVNGHKFSVSGEGEGDATYGKLTLKFICTTGKLPVPWPTLVTTLTYGVQCFSRYPDHMKQHDFFKSAMPEGYVQERTIFFKDDGNYKTRAEVKFEGDTLVNRIELKGIDFKEDGNILGHKLEYNYNSHNVYIMADKQKNGIKVNFKIRHNIEDGSVQLADHYQQNTPIGDGPVLLPDNHYLSTQSALSKDPNEKRDHMVLLEFVTAAGITLGMDELYK

SEQ ID NO: 244 - protein, 1489 aa, synthetic construct
  REGION 1..1489: note = SYNTHETIC
MSKLEKFTNCYSLSKTLRFKAIPVGKTQENIDNKRLLVEDEKRAEDYKGVKKLLDRYYLSFINDVLHSIKLKNLNNYISLFRKKTRTEKENKELENLEINLRKEIAKAFKGNEGYKSLFKKDIIETILPEFLDDKDEIALVNSFNGFTTAFTGFFDNRENMFSEEAKSTSIAFRCINENLTRYISNMDIFEKVDAIFDKHEVQEIKEKILNSDYDVEDFFEGEFFNFVLTQEGIDVYNAIIGGFVTESGEKIKGLNEYINLYNQKTKQKLPKFKPLYKQVLSDRESLSFYGEGYTSDEEVLEVFRNTLNKNSEIFSSIKKLEKLFKNFDEYSSAGIFVKNGPAISTISKDIFGEWNVIRDKWNAEYDDIHLKKKAVVTEKYEDDRRKSFKKIGSFSLEQLQEYADADLSVVEKLKEIIIQKVDEIYKVYGSSEKLFDADFVLEKSLKKNDAVVAIMKDLLDSVKSFENYIKAFFGEGKETNRDESFYGDFVLAYDILLKVDHIYDAIRNYVTQKPYSKDKFKLYFQNPQFMGGWDKDKETDYRATILRYGSKYYLAIMDKKYAKCLQKIDKDDVNGNYEKINYKLLPGPNKMLPKVFFSKKWMAYYNPSEDIQKIYKNGTFKKGDMFNLNDCHKLIDFFKDSISRYPKWSNAYDFNFSETEKYKDIAGFYREVEEQGYKVSFESASKKEVDKLVEEGKLYMFQIYNKDFSDKSHGTPNLHTMYFKLLFDENNHGQIRLSGGAELFMRRASLKKEELVVHPANSPIANKNPDNPKKTTTLSYDVYKDKRFSEDQYLLHIPIAINKCPKNIFKINTEVRVLLKHDDNPYVIGIDRGERNLLYIVVVDGKGNIVEQYSLNEIINNFNGIRIKTDYHSLLDKKEKERFEARQNWTSIENIKELKAGYISQVVHKICELVEKYDAVIALEDLNSGFKNSRVKVEKQVYQKFEKMLIDKLNYMVDKKSNPCATGGALKGYQITNKFESFKSMSTQNGFIFYIPAWLTSKIDPSTGFVNLLKTKYTSIADSKKFISSFDRIMYVPEEDLFEFALDYKNFSRTDADYIKKWKLYSYGNRIRIFRNPKKNNVFDWEEVCLTSAYKELFNKYGINYQQGDIRALLCEQSDKAFYSSFMALMSLMLQMRNSITGRTDVDFLISPVKNSDGIFYDSRNYEAQENAILPKNADANGAYNIARKVLWAIGQFKKAEDEKLDKVKIAISNKEWLEYAQTSVKHAEAAAKEAAAKEAAAKEAAAKAMVSKGEELFTGVVPILVELDGDVNGHKFSVSGEGEGDATYGKLTLKFICTTGKLPVPWPTLVTTLTYGVQCFSRYPDHMKQHDFFKSAMPEGYVQERTIFFKDDGNYKTRAEVKFEGDTLVNRIELKGIDFKEDGNILGHKLEYNYNSHNVYIMADKQKNGIKVNFKIRHNIEDGSVQLADHYQQNTPIGDGPVLLPDNHYLSTQSALSKDPNEKRDHMVLLEFVTAAGITLGMDELYK

SEQ ID NO: 245 - protein, 1513 aa, synthetic construct
  REGION 1..1513: note = SYNTHETIC
MSKLEKFTNCYSLSKTLRFKAIPVGKTQENIDNKRLLVEDEKRAEDYKGVKKLLDRYYLSFINDVLHSIKLKNLNNYISLFRKKTRTEKENKELENLEINLRKEIAKAFKGNEGYKSLFKKDIIETILPEFLDDKDEIALVNSFNGFTTAFTGFFDNRENMFSEEAKSTSIAFRCINENLTRYISNMDIFEKVDAIFDKHEVQEIKEKILNSDYDVEDFFEGEFFNFVLTQEGIDVYNAIIGGFVTESGEKIKGLNEYINLYNQKTKQKLPKFKPLYKQVLSDRESLSFYGEGYTSDEEVLEVFRNTLNKNSEIFSSIKKLEKLFKNFDEYSSAGIFVKNGPAISTISKDIFGEWNVIRDKWNAEYDDIHLKKKAVVTEKYEDDRRKSFKKIGSFSLEQLQEYADADLSVVEKLKEIIIQKVDEIYKVYGSSEKLFDADFVLEKSLKKNDAVVAIMKDLLDSVKSFENYIKAFFGEGKETNRDESFYGDFVLAYDILLKVDHIYDAIRNYVTQKPYSKDKFKLYFQNPQFMGGWDKDKETDYRATILRYGSKYYLAIMDKKYAKCLQKIDKDDVNGNYEKINYKLLPGPNKMLPKVFFSKKWMAYYNPSEDIQKIYKNGTFKKGDMFNLNDCHKLIDFFKDSISRYPKWSNAYDFNFSETEKYKDIAGFYREVEEQGYKVSFESASKKEVDKLVEEGKLYMFQIYNKDFSDKSHGTPNLHTMYFKLLFDENNHGQIRLSGGAELFMRRASLKKEELVVHPANSPIANKNPDNPKKTTTLSYDVYKDKRFSEDQYLLHIPIAINKCPKNIFKINTEVRVLLKHDDNPYVIGIDRGERNLLYIVVVDGKGNIVEQYSLNEIINNFNGIRIKTDYHSLLDKKEKERFEARQNWTSIENIKELKAGYISQVVHKICELVEKYDAVIALEDLNSGFKNSRVKVEKQVYQKFEKMLIDKLNYMVDKKSNPCATGGALKGYQITNKFESFKSMSTQNGFIFYIPAWLTSKIDPSTGFVNLLKTKYTSIADSKKFISSFDRIMYVPEEDLFEFALDYKNFSRTDADYIKKWKLYSYGNRIRIFRNPKKNNVFDWEEVCLTSAYKELFNKYGINYQQGDIRALLCEQSDKAFYSSFMALMSLMLQMRNSITGRTDVDFLISPVKNSDGIFYDSRNYEAQENAILPKNADANGAYNIARKVLWAIGQFKKAEDEKLDKVKIAISNKEWLEYAQTSVKHAEAAAKEAAAKEAAAKEAAAKALEAEAAAKEAAAKEAAAKEAAAKAMVSKGEELFTGVVPILVELDGDVNGHKFSVSGEGEGDATYGKLTLKFICTTGKLPVPWPTLVTTLTYGVQCFSRYPDHMKQHDFFKSAMPEGYVQERTIFFKDDGNYKTRAEVKFEGDTLVNRIELKGIDFKEDGNILGHKLEYNYNSHNVYIMADKQKNGIKVNFKIRHNIEDGSVQLADHYQQNTPIGDGPVLLPDNHYLSTQSALSKDPNEKRDHMVLLEFVTAAGITLGMDELYK

SEQ ID NO: 246 - protein, 1517 aa, synthetic construct
  REGION 1..1517: note = SYNTHETIC
MSKLEKFTNCYSLSKTLRFKAIPVGKTQENIDNKRLLVEDEKRAEDYKGVKKLLDRYYLSFINDVLHSIKLKNLNNYISLFRKKTRTEKENKELENLEINLRKEIAKAFKGNEGYKSLFKKDIIETILPEFLDDKDEIALVNSFNGFTTAFTGFFDNRENMFSEEAKSTSIAFRCINENLTRYISNMDIFEKVDAIFDKHEVQEIKEKILNSDYDVEDFFEGEFFNFVLTQEGIDVYNAIIGGFVTESGEKIKGLNEYINLYNQKTKQKLPKFKPLYKQVLSDRESLSFYGEGYTSDEEVLEVFRNTLNKNSEIFSSIKKLEKLFKNFDEYSSAGIFVKNGPAISTISKDIFGEWNVIRDKWNAEYDDIHLKKKAVVTEKYEDDRRKSFKKIGSFSLEQLQEYADADLSVVEKLKEIIIQKVDEIYKVYGSSEKLFDADFVLEKSLKKNDAVVAIMKDLLDSVKSFENYIKAFFGEGKETNRDESFYGDFVLAYDILLKVDHIYDAIRNYVTQKPYSKDKFKLYFQNPQFMGGWDKDKETDYRATILRYGSKYYLAIMDKKYAKCLQKIDKDDVNGNYEKINYKLLPGPNKMLPKVFFSKKWMAYYNPSEDIQKIYKNGTFKKGDMFNLNDCHKLIDFFKDSISRYPKWSNAYDFNFSETEKYKDIAGFYREVEEQGYKVSFESASKKEVDKLVEEGKLYMFQIYNKDFSDKSHGTPNLHTMYFKLLFDENNHGQIRLSGGAELFMRRASLKKEELVVHPANSPIANKNPDNPKKTTTLSYDVYKDKRFSEDQYLLHIPIAINKCPKNIFKINTEVRVLLKHDDNPYVIGIDRGERNLLYIVVVDGKGNIVEQYSLNEIINNFNGIRIKTDYHSLLDKKEKERFEARQNWTSIENIKELKAGYISQVVHKICELVEKYDAVIALEDLNSGFKNSRVKVEKQVYQKFEKMLIDKLNYMVDKKSNPCATGGALKGYQITNKFESFKSMSTQNGFIFYIPAWLTSKIDPSTGFVNLLKTKYTSIADSKKFISSFDRIMYVPEEDLFEFALDYKNFSRTDADYIKKWKLYSYGNRIRIFRNPKKNNVFDWEEVCLTSAYKELFNKYGINYQQGDIRALLCEQSDKAFYSSFMALMSLMLQMRNSITGRTDVDFLISPVKNSDGIFYDSRNYEAQENAILPKNADANGAYNIARKVLWAIGQFKKAEDEKLDKVKIAISNKEWLEYAQTSVKHLEAEAAAKEAAAKEAAAKEAAAKALEAEAAAKEAAAKEAAAKEAAAKALEMVSKGEELFTGVVPILVELDGDVNGHKFSVSGEGEGDATYGKLTLKFICTTGKLPVPWPTLVTTLTYGVQCFSRYPDHMKQHDFFKSAMPEGYVQERTIFFKDDGNYKTRAEVKFEGDTLVNRIELKGIDFKEDGNILGHKLEYNYNSHNVYIMADKQKNGIKVNFKIRHNIEDGSVQLADHYQQNTPIGDGPVLLPDNHYLSTQSALSKDPNEKRDHMVLLEFVTAAGITLGMDELYK

SEQ ID NO: 247 - protein, 1470 aa, synthetic construct
  REGION 1..1470: note = SYNTHETIC
MSKLEKFTNCYSLSKTLRFKAIPVGKTQENIDNKRLLVEDEKRAEDYKGVKKLLDRYYLSFINDVLHSIKLKNLNNYISLFRKKTRTEKENKELENLEINLRKEIAKAFKGNEGYKSLFKKDIIETILPEFLDDKDEIALVNSFNGFTTAFTGFFDNRENMFSEEAKSTSIAFRCINENLTRYISNMDIFEKVDAIFDKHEVQEIKEKILNSDYDVEDFFEGEFFNFVLTQEGIDVYNAIIGGFVTESGEKIKGLNEYINLYNQKTKQKLPKFKPLYKQVLSDRESLSFYGEGYTSDEEVLEVFRNTLNKNSEIFSSIKKLEKLFKNFDEYSSAGIFVKNGPAISTISKDIFGEWNVIRDKWNAEYDDIHLKKKAVVTEKYEDDRRKSFKKIGSFSLEQLQEYADADLSVVEKLKEIIIQKVDEIYKVYGSSEKLFDADFVLEKSLKKNDAVVAIMKDLLDSVKSFENYIKAFFGEGKETNRDESFYGDFVLAYDILLKVDHIYDAIRNYVTQKPYSKDKFKLYFQNPQFMGGWDKDKETDYRATILRYGSKYYLAIMDKKYAKCLQKIDKDDVNGNYEKINYKLLPGPNKMLPKVFFSKKWMAYYNPSEDIQKIYKNGTFKKGDMFNLNDCHKLIDFFKDSISRYPKWSNAYDFNFSETEKYKDIAGFYREVEEQGYKVSFESASKKEVDKLVEEGKLYMFQIYNKDFSDKSHGTPNLHTMYFKLLFDENNHGQIRLSGGAELFMRRASLKKEELVVHPANSPIANKNPDNPKKTTTLSYDVYKDKRFSEDQYLLHIPIAINKCPKNIFKINTEVRVLLKHDDNPYVIGIDRGERNLLYIVVVDGKGNIVEQYSLNEIINNFNGIRIKTDYHSLLDKKEKERFEARQNWTSIENIKELKAGYISQVVHKICELVEKYDAVIALEDLNSGFKNSRVKVEKQVYQKFEKMLIDKLNYMVDKKSNPCATGGALKGYQITNKFESFKSMSTQNGFIFYIPAWLTSKIDPSTGFVNLLKTKYTSIADSKKFISSFDRIMYVPEEDLFEFALDYKNFSRTDADYIKKWKLYSYGNRIRIFRNPKKNNVFDWEEVCLTSAYKELFNKYGINYQQGDIRALLCEQSDKAFYSSFMALMSLMLQMRNSITGRTDVDFLISPVKNSDGIFYDSRNYEAQENAILPKNADANGAYNIARKVLWAIGQFKKAEDEKLDKVKIAISNKEWLEYAQTSVKHAPAMVSKGEELFTGVVPILVELDGDVNGHKFSVSGEGEGDATYGKLTLKFICTTGKLPVPWPTLVTTLTYGVQCFSRYPDHMKQHDFFKSAMPEGYVQERTIFFKDDGNYKTRAEVKFEGDTLVNRIELKGIDFKEDGNILGHKLEYNYNSHNVYIMADKQKNGIKVNFKIRHNIEDGSVQLADHYQQNTPIGDGPVLLPDNHYLSTQSALSKDPNEKRDHMVLLEFVTAAGITLGMDELYK

SEQ ID NO: 248 - protein, 1472 aa, synthetic construct
  REGION 1..1472: note = SYNTHETIC
MSKLEKFTNCYSLSKTLRFKAIPVGKTQENIDNKRLLVEDEKRAEDYKGVKKLLDRYYLSFINDVLHSIKLKNLNNYISLFRKKTRTEKENKELENLEINLRKEIAKAFKGNEGYKSLFKKDIIETILPEFLDDKDEIALVNSFNGFTTAFTGFFDNRENMFSEEAKSTSIAFRCINENLTRYISNMDIFEKVDAIFDKHEVQEIKEKILNSDYDVEDFFEGEFFNFVLTQEGIDVYNAIIGGFVTESGEKIKGLNEYINLYNQKTKQKLPKFKPLYKQVLSDRESLSFYGEGYTSDEEVLEVFRNTLNKNSEIFSSIKKLEKLFKNFDEYSSAGIFVKNGPAISTISKDIFGEWNVIRDKWNAEYDDIHLKKKAVVTEKYEDDRRKSFKKIGSFSLEQLQEYADADLSVVEKLKEIIIQKVDEIYKVYGSSEKLFDADFVLEKSLKKNDAVVAIMKDLLDSVKSFENYIKAFFGEGKETNRDESFYGDFVLAYDILLKVDHIYDAIRNYVTQKPYSKDKFKLYFQNPQFMGGWDKDKETDYRATILRYGSKYYLAIMDKKYAKCLQKIDKDDVNGNYEKINYKLLPGPNKMLPKVFFSKKWMAYYNPSEDIQKIYKNGTFKKGDMFNLNDCHKLIDFFKDSISRYPKWSNAYDFNFSETEKYKDIAGFYREVEEQGYKVSFESASKKEVDKLVEEGKLYMFQIYNKDFSDKSHGTPNLHTMYFKLLFDENNHGQIRLSGGAELFMRRASLKKEELVVHPANSPIANKNPDNPKKTTTLSYDVYKDKRFSEDQYLLHIPIAINKCPKNIFKINTEVRVLLKHDDNPYVIGIDRGERNLLYIVVVDGKGNIVEQYSLNEIINNFNGIRIKTDYHSLLDKKEKERFEARQNWTSIENIKELKAGYISQVVHKICELVEKYDAVIALEDLNSGFKNSRVKVEKQVYQKFEKMLIDKLNYMVDKKSNPCATGGALKGYQITNKFESFKSMSTQNGFIFYIPAWLTSKIDPSTGFVNLLKTKYTSIADSKKFISSFDRIMYVPEEDLFEFALDYKNFSRTDADYIKKWKLYSYGNRIRIFRNPKKNNVFDWEEVCLTSAYKELFNKYGINYQQGDIRALLCEQSDKAFYSSFMALMSLMLQMRNSITGRTDVDFLISPVKNSDGIFYDSRNYEAQENAILPKNADANGAYNIARKVLWAIGQFKKAEDEKLDKVKIAISNKEWLEYAQTSVKHAPAPAMVSKGEELFTGVVPILVELDGDVNGHKFSVSGEGEGDATYGKLTLKFICTTGKLPVPWPTLVTTLTYGVQCFSRYPDHMKQHDFFKSAMPEGYVQERTIFFKDDGNYKTRAEVKFEGDTLVNRIELKGIDFKEDGNILGHKLEYNYNSHNVYIMADKQKNGIKVNFKIRHNIEDGSVQLADHYQQNTPIGDGPVLLPDNHYLSTQSALSKDPNEKRDHMVLLEFVTAAGITLGMDELYK

SEQ ID NO: 249 - protein, 1474 aa, synthetic construct
  REGION 1..1474: note = SYNTHETIC
MSKLEKFTNCYSLSKTLRFKAIPVGKTQENIDNKRLLVEDEKRAEDYKGVKKLLDRYYLSFINDVLHSIKLKNLNNYISLFRKKTRTEKENKELENLEINLRKEIAKAFKGNEGYKSLFKKDIIETILPEFLDDKDEIALVNSFNGFTTAFTGFFDNRENMFSEEAKSTSIAFRCINENLTRYISNMDIFEKVDAIFDKHEVQEIKEKILNSDYDVEDFFEGEFFNFVLTQEGIDVYNAIIGGFVTESGEKIKGLNEYINLYNQKTKQKLPKFKPLYKQVLSDRESLSFYGEGYTSDEEVLEVFRNTLNKNSEIFSSIKKLEKLFKNFDEYSSAGIFVKNGPAISTISKDIFGEWNVIRDKWNAEYDDIHLKKKAVVTEKYEDDRRKSFKKIGSFSLEQLQEYADADLSVVEKLKEIIIQKVDEIYKVYGSSEKLFDADFVLEKSLKKNDAVVAIMKDLLDSVKSFENYIKAFFGEGKETNRDESFYGDFVLAYDILLKVDHIYDAIRNYVTQKPYSKDKFKLYFQNPQFMGGWDKDKETDYRATILRYGSKYYLAIMDKKYAKCLQKIDKDDVNGNYEKINYKLLPGPNKMLPKVFFSKKWMAYYNPSEDIQKIYKNGTFKKGDMFNLNDCHKLIDFFKDSISRYPKWSNAYDFNFSETEKYKDIAGFYREVEEQGYKVSFESASKKEVDKLVEEGKLYMFQIYNKDFSDKSHGTPNLHTMYFKLLFDENNHGQIRLSGGAELFMRRASLKKEELVVHPANSPIANKNPDNPKKTTTLSYDVYKDKRFSEDQYLLHIPIAINKCPKNIFKINTEVRVLLKHDDNPYVIGIDRGERNLLYIVVVDGKGNIVEQYSLNEIINNFNGIRIKTDYHSLLDKKEKERFEARQNWTSIENIKELKAGYISQVVHKICELVEKYDAVIALEDLNSGFKNSRVKVEKQVYQKFEKMLIDKLNYMVDKKSNPCATGGALKGYQITNKFESFKSMSTQNGFIFYIPAWLTSKIDPSTGFVNLLKTKYTSIADSKKFISSFDRIMYVPEEDLFEFALDYKNFSRTDADYIKKWKLYSYGNRIRIFRNPKKNNVFDWEEVCLTSAYKELFNKYGINYQQGDIRALLCEQSDKAFYSSFMALMSLMLQMRNSITGRTDVDFLISPVKNSDGIFYDSRNYEAQENAILPKNADANGAYNIARKVLWAIGQFKKAEDEKLDKVKIAISNKEWLEYAQTSVKHAPAPAPAMVSKGEELFTGVVPILVELDGDVNGHKFSVSGEGEGDATYGKLTLKFICTTGKLPVPWPTLVTTLTYGVQCFSRYPDHMKQHDFFKSAMPEGYVQERTIFFKDDGNYKTRAEVKFEGDTLVNRIELKGIDFKEDGNILGHKLEYNYNSHNVYIMADKQKNGIKVNFKIRHNIEDGSVQLADHYQQNTPIGDGPVLLPDNHYLSTQSALSKDPNEKRDHMVLLEFVTAAGITLGMDELYK

SEQ ID NO: 250 - protein, 1476 aa, synthetic construct
  REGION 1..1476: note = SYNTHETIC
MSKLEKFTNCYSLSKTLRFKAIPVGKTQENIDNKRLLVEDEKRAEDYKGVKKLLDRYYLSFINDVLHSIKLKNLNNYISLFRKKTRTEKENKELENLEINLRKEIAKAFKGNEGYKSLFKKDIIETILPEFLDDKDEIALVNSFNGFTTAFTGFFDNRENMFSEEAKSTSIAFRCINENLTRYISNMDIFEKVDAIFDKHEVQEIKEKILNSDYDVEDFFEGEFFNFVLTQEGIDVYNAIIGGFVTESGEKIKGLNEYINLYNQKTKQKLPKFKPLYKQVLSDRESLSFYGEGYTSDEEVLEVFRNTLNKNSEIFSSIKKLEKLFKNFDEYSSAGIFVKNGPAISTISKDIFGEWNVIRDKWNAEYDDIHLKKKAVVTEKYEDDRRKSFKKIGSFSLEQLQEYADADLSVVEKLKEIIIQKVDEIYKVYGSSEKLFDADFVLEKSLKKNDAVVAIMKDLLDSVKSFENYIKAFFGEGKETNRDESFYGDFVLAYDILLKVDHIYDAIRNYVTQKPYSKDKFKLYFQNPQFMGGWDKDKETDYRATILRYGSKYYLAIMDKKYAKCLQKIDKDDVNGNYEKINYKLLPGPNKMLPKVFFSKKWMAYYNPSEDIQKIYKNGTFKKGDMFNLNDCHKLIDFFKDSISRYPKWSNAYDFNFSETEKYKDIAGFYREVEEQGYKVSFESASKKEVDKLVEEGKLYMFQIYNKDFSDKSHGTPNLHTMYFKLLFDENNHGQIRLSGGAELFMRRASLKKEELVVHPANSPIANKNPDNPKKTTTLSYDVYKDKRFSEDQYLLHIPIAINKCPKNIFKINTEVRVLLKHDDNPYVIGIDRGERNLLYIVVVDGKGNIVEQYSLNEIINNFNGIRIKTDYHSLLDKKEKERFEARQNWTSIENIKELKAGYISQVVHKICELVEKYDAVIALEDLNSGFKNSRVKVEKQVYQKFEKMLIDKLNYMVDKKSNPCATGGALKGYQITNKFESFKSMSTQNGFIFYIPAWLTSKIDPSTGFVNLLKTKYTSIADSKKFISSFDRIMYVPEEDLFEFALDYKNFSRTDADYIKKWKLYSYGNRIRIFRNPKKNNVFDWEEVCLTSAYKELFNKYGINYQQGDIRALLCEQSDKAFYSSFMALMSLMLQMRNSITGRTDVDFLISPVKNSDGIFYDSRNYEAQENAILPKNADANGAYNIARKVLWAIGQFKKAEDEKLDKVKIAISNKEWLEYAQTSVKHAPAPAPAPAMVSKGEELFTGVVPILVELDGDVNGHKFSVSGEGEGDATYGKLTLKFICTTGKLPVPWPTLVTTLTYGVQCFSRYPDHMKQHDFFKSAMPEGYVQERTIFFKDDGNYKTRAEVKFEGDTLVNRIELKGIDFKEDGNILGHKLEYNYNSHNVYIMADKQKNGIKVNFKIRHNIEDGSVQLADHYQQNTPIGDGPVLLPDNHYLSTQSALSKDPNEKRDHMVLLEFVTAAGITLGMDELYK

SEQ ID NO: 251 - protein, 1478 aa, synthetic construct
  REGION 1..1478: note = SYNTHETIC
MSKLEKFTNCYSLSKTLRFKAIPVGKTQENIDNKRLLVEDEKRAEDYKGVKKLLDRYYLSFINDVLHSIKLKNLNNYISLFRKKTRTEKENKELENLEINLRKEIAKAFKGNEGYKSLFKKDIIETILPEFLDDKDEIALVNSFNGFTTAFTGFFDNRENMFSEEAKSTSIAFRCINENLTRYISNMDIFEKVDAIFDKHEVQEIKEKILNSDYDVEDFFEGEFFNFVLTQEGIDVYNAIIGGFVTESGEKIKGLNEYINLYNQKTKQKLPKFKPLYKQVLSDRESLSFYGEGYTSDEEVLEVFRNTLNKNSEIFSSIKKLEKLFKNFDEYSSAGIFVKNGPAISTISKDIFGEWNVIRDKWNAEYDDIHLKKKAVVTEKYEDDRRKSFKKIGSFSLEQLQEYADADLSVVEKLKEIIIQKVDEIYKVYGSSEKLFDADFVLEKSLKKNDAVVAIMKDLLDSVKSFENYIKAFFGEGKETNRDESFYGDFVLAYDILLKVDHIYDAIRNYVTQKPYSKDKFKLYFQNPQFMGGWDKDKETDYRATILRYGSKYYLAIMDKKYAKCLQKIDKDDVNGNYEKINYKLLPGPNKMLPKVFFSKKWMAYYNPSEDIQKIYKNGTFKKGDMFNLNDCHKLIDFFKDSISRYPKWSNAYDFNFSETEKYKDIAGFYREVEEQGYKVSFESASKKEVDKLVEEGKLYMFQIYNKDFSDKSHGTPNLHTMYFKLLFDENNHGQIRLSGGAELFMRRASLKKEELVVHPANSPIANKNPDNPKKTTTLSYDVYKDKRFSEDQYLLHIPIAINKCPKNIFKINTEVRVLLKHDDNPYVIGIDRGERNLLYIVVVDGKGNIVEQYSLNEIINNFNGIRIKTDYHSLLDKKEKERFEARQNWTSIENIKELKAGYISQVVHKICELVEKYDAVIALEDLNSGFKNSRVKVEKQVYQKFEKMLIDKLNYMVDKKSNPCATGGALKGYQITNKFESFKSMSTQNGFIFYIPAWLTSKIDPSTGFVNLLKTKYTSIADSKKFISSFDRIMYVPEEDLFEFALDYKNFSRTDADYIKKWKLYSYGNRIRIFRNPKKNNVFDWEEVCLTSAYKELFNKYGINYQQGDIRALLCEQSDKAFYSSFMALMSLMLQMRNSITGRTDVDFLISPVKNSDGIFYDSRNYEAQENAILPKNADANGAYNIARKVLWAIGQFKKAEDEKLDKVKIAISNKEWLEYAQTSVKHAPAPAPAPAPAMVSKGEELFTGVVPILVELDGDVNGHKFSVSGEGEGDATYGKLTLKFICTTGKLPVPWPTLVTTLTYGVQCFSRYPDHMKQHDFFKSAMPEGYVQERTIFFKDDGNYKTRAEVKFEGDTLVNRIELKGIDFKEDGNILGHKLEYNYNSHNVYIMADKQKNGIKVNFKIRHNIEDGSVQLADHYQQNTPIGDGPVLLPDNHYLSTQSALSKDPNEKRDHMVLLEFVTAAGITLGMDELYK

SEQ ID NO: 252 - protein, 1480 aa, synthetic construct
  REGION 1..1480: note = SYNTHETIC
MSKLEKFTNCYSLSKTLRFKAIPVGKTQENIDNKRLLVEDEKRAEDYKGVKKLLDRYYLSFINDVLHSIKLKNLNNYISLFRKKTRTEKENKELENLEINLRKEIAKAFKGNEGYKSLFKKDIIETILPEFLDDKDEIALVNSFNGFTTAFTGFFDNRENMFSEEAKSTSIAFRCINENLTRYISNMDIFEKVDAIFDKHEVQEIKEKILNSDYDVEDFFEGEFFNFVLTQEGIDVYNAIIGGFVTESGEKIKGLNEYINLYNQKTKQKLPKFKPLYKQVLSDRESLSFYGEGYTSDEEVLEVFRNTLNKNSEIFSSIKKLEKLFKNFDEYSSAGIFVKNGPAISTISKDIFGEWNVIRDKWNAEYDDIHLKKKAVVTEKYEDDRRKSFKKIGSFSLEQLQEYADADLSVVEKLKEIIIQKVDEIYKVYGSSEKLFDADFVLEKSLKKNDAVVAIMKDLLDSVKSFENYIKAFFGEGKETNRDESFYGDFVLAYDILLKVDHIYDAIRNYVTQKPYSKDKFKLYFQNPQFMGGWDKDKETDYRATILRYGSKYYLAIMDKKYAKCLQKIDKDDVNGNYEKINYKLLPGPNKMLPKVFFSKKWMAYYNPSEDIQKIYKNGTFKKGDMFNLNDCHKLIDFFKDSISRYPKWSNAYDFNFSETEKYKDIAGFYREVEEQGYKVSFESASKKEVDKLVEEGKLYMFQIYNKDFSDKSHGTPNLHTMYFKLLFDENNHGQIRLSGGAELFMRRASLKKEELVVHPANSPIANKNPDNPKKTTTLSYDVYKDKRFSEDQYLLHIPIAINKCPKNIFKINTEVRVLLKHDDNPYVIGIDRGERNLLYIVVVDGKGNIVEQYSLNEIINNFNGIRIKTDYHSLLDKKEKERFEARQNWTSIENIKELKAGYISQVVHKICELVEKYDAVIALEDLNSGFKNSRVKVEKQVYQKFEKMLIDKLNYMVDKKSNPCATGGALKGYQITNKFESFKSMSTQNGFIFYIPAWLTSKIDPSTGFVNLLKTKYTSIADSKKFISSFDRIMYVPEEDLFEFALDYKNFSRTDADYIKKWKLYSYGNRIRIFRNPKKNNVFDWEEVCLTSAYKELFNKYGINYQQGDIRALLCEQSDKAFYSSFMALMSLMLQMRNSITGRTDVDFLISPVKNSDGIFYDSRNYEAQENAILPKNADANGAYNIARKVLWAIGQFKKAEDEKLDKVKIAISNKEWLEYAQTSVKHAPAPAPAPAPAPAMVSKGEELFTGVVPILVELDGDVNGHKFSVSGEGEGDATYGKLTLKFICTTGKLPVPWPTLVTTLTYGVQCFSRYPDHMKQHDFFKSAMPEGYVQERTIFFKDDGNYKTRAEVKFEGDTLVNRIELKGIDFKEDGNILGHKLEYNYNSHNVYIMADKQKNGIKVNFKIRHNIEDGSVQLADHYQQNTPIGDGPVLLPDNHYLSTQSALSKDPNEKRDHMVLLEFVTAAGITLGMDELYK

SEQ ID NO: 253 - protein, 1482 aa, synthetic construct
  REGION 1..1482: note = SYNTHETIC
MSKLEKFTNCYSLSKTLRFKAIPVGKTQENIDNKRLLVEDEKRAEDYKGVKKLLDRYYLSFINDVLHSIKLKNLNNYISLFRKKTRTEKENKELENLEINLRKEIAKAFKGNEGYKSLFKKDIIETILPEFLDDKDEIALVNSFNGFTTAFTGFFDNRENMFSEEAKSTSIAFRCINENLTRYISNMDIFEKVDAIFDKHEVQEIKEKILNSDYDVEDFFEGEFFNFVLTQEGIDVYNAIIGGFVTESGEKIKGLNEYINLYNQKTKQKLPKFKPLYKQVLSDRESLSFYGEGYTSDEEVLEVFRNTLNKNSEIFSSIKKLEKLFKNFDEYSSAGIFVKNGPAISTISKDIFGEWNVIRDKWNAEYDDIHLKKKAVVTEKYEDDRRKSFKKIGSFSLEQLQEYADADLSVVEKLKEIIIQKVDEIYKVYGSSEKLFDADFVLEKSLKKNDAVVAIMKDLLDSVKSFENYIKAFFGEGKETNRDESFYGDFVLAYDILLKVDHIYDAIRNYVTQKPYSKDKFKLYFQNPQFMGGWDKDKETDYRATILRYGSKYYLAIMDKKYAKCLQKIDKDDVNGNYEKINYKLLPGPNKMLPKVFFSKKWMAYYNPSEDIQKIYKNGTFKKGDMFNLNDCHKLIDFFKDSISRYPKWSNAYDFNFSETEKYKDIAGFYREVEEQGYKVSFESASKKEVDKLVEEGKLYMFQIYNKDFSDKSHGTPNLHTMYFKLLFDENNHGQIRLSGGAELFMRRASLKKEELVVHPANSPIANKNPDNPKKTTTLSYDVYKDKRFSEDQYLLHIPIAINKCPKNIFKINTEVRVLLKHDDNPYVIGIDRGERNLLYIVVVDGKGNIVEQYSLNEIINNFNGIRIKTDYHSLLDKKEKERFEARQNWTSIENIKELKAGYISQVVHKICELVEKYDAVIALEDLNSGFKNSRVKVEKQVYQKFEKMLIDKLNYMVDKKSNPCATGGALKGYQITNKFESFKSMSTQNGFIFYIPAWLTSKIDPSTGFVNLLKTKYTSIADSKKFISSFDRIMYVPEEDLFEFALDYKNFSRTDADYIKKWKLYSYGNRIRIFRNPKKNNVFDWEEVCLTSAYKELFNKYGINYQQGDIRALLCEQSDKAFYSSFMALMSLMLQMRNSITGRTDVDFLISPVKNSDGIFYDSRNYEAQENAILPKNADANGAYNIARKVLWAIGQFKKAEDEKLDKVKIAISNKEWLEYAQTSVKHAPAPAPAPAPAPAPAMVSKGEELFTGVVPILVELDGDVNGHKFSVSGEGEGDATYGKLTLKFICTTGKLPVPWPTLVTTLTYGVQCFSRYPDHMKQHDFFKSAMPEGYVQERTIFFKDDGNYKTRAEVKFEGDTLVNRIELKGIDFKEDGNILGHKLEYNYNSHNVYIMADKQKNGIKVNFKIRHNIEDGSVQLADHYQQNTPIGDGPVLLPDNHYLSTQSALSKDPNEKRDHMVLLEFVTAAGITLGMDELYK

SEQ ID NO: 254 - protein, 1484 aa, synthetic construct
  REGION 1..1484: note = SYNTHETIC
MSKLEKFTNCYSLSKTLRFKAIPVGKTQENIDNKRLLVEDEKRAEDYKGVKKLLDRYYLSFINDVLHSIKLKNLNNYISLFRKKTRTEKENKELENLEINLRKEIAKAFKGNEGYKSLFKKDIIETILPEFLDDKDEIALVNSFNGFTTAFTGFFDNRENMFSEEAKSTSIAFRCINENLTRYISNMDIFEKVDAIFDKHEVQEIKEKILNSDYDVEDFFEGEFFNFVLTQEGIDVYNAIIGGFVTESGEKIKGLNEYINLYNQKTKQKLPKFKPLYKQVLSDRESLSFYGEGYTSDEEVLEVFRNTLNKNSEIFSSIKKLEKLFKNFDEYSSAGIFVKNGPAISTISKDIFGEWNVIRDKWNAEYDDIHLKKKAVVTEKYEDDRRKSFKKIGSFSLEQLQEYADADLSVVEKLKEIIIQKVDEIYKVYGSSEKLFDADFVLEKSLKKNDAVVAIMKDLLDSVKSFENYIKAFFGEGKETNRDESFYGDFVLAYDILLKVDHIYDAIRNYVTQKPYSKDKFKLYFQNPQFMGGWDKDKETDYRATILRYGSKYYLAIMDKKYAKCLQKIDKDDVNGNYEKINYKLLPGPNKMLPKVFFSKKWMAYYNPSEDIQKIYKNGTFKKGDMFNLNDCHKLIDFFKDSISRYPKWSNAYDFNFSETEKYKDIAGFYREVEEQGYKVSFESASKKEVDKLVEEGKLYMFQIYNKDFSDKSHGTPNLHTMYFKLLFDENNHGQIRLSGGAELFMRRASLKKEELVVHPANSPIANKNPDNPKKTTTLSYDVYKDKRFSEDQYLLHIPIAINKCPKNIFKINTEVRVLLKHDDNPYVIGIDRGERNLLYIVVVDGKGNIVEQYSLNEIINNFNGIRIKTDYHSLLDKKEKERFEARQNWTSIENIKELKAGYISQVVHKICELVEKYDAVIALEDLNSGFKNSRVKVEKQVYQKFEKMLIDKLNYMVDKKSNPCATGGALKGYQITNKFESFKSMSTQNGFIFYIPAWLTSKIDPSTGFVNLLKTKYTSIADSKKFISSFDRIMYVPEEDLFEFALDYKNFSRTDADYIKKWKLYSYGNRIRIFRNPKKNNVFDWEEVCLTSAYKELFNKYGINYQQGDIRALLCEQSDKAFYSSFMALMSLMLQMRNSITGRTDVDFLISPVKNSDGIFYDSRNYEAQENAILPKNADANGAYNIARKVLWAIGQFKKAEDEKLDKVKIAISNKEWLEYAQTSVKHAPAPAPAPAPAPAPAPAMVSKGEELFTGVVPILVELDGDVNGHKFSVSGEGEGDATYGKLTLKFICTTGKLPVPWPTLVTTLTYGVQCFSRYPDHMKQHDFFKSAMPEGYVQERTIFFKDDGNYKTRAEVKFEGDTLVNRIELKGIDFKEDGNILGHKLEYNYNSHNVYIMADKQKNGIKVNFKIRHNIEDGSVQLADHYQQNTPIGDGPVLLPDNHYLSTQSALSKDPNEKRDHMVLLEFVTAAGITLGMDELYK

SEQ ID NO: 255 - protein, 1486 aa, synthetic construct
  REGION 1..1486: note = SYNTHETIC
MSKLEKFTNCYSLSKTLRFKAIPVGKTQENIDNKRLLVEDEKRAEDYKGVKKLLDRYYLSFINDVLHSIKLKNLNNYISLFRKKTRTEKENKELENLEINLRKEIAKAFKGNEGYKSLFKKDIIETILPEFLDDKDEIALVNSFNGFTTAFTGFFDNRENMFSEEAKSTSIAFRCINENLTRYISNMDIFEKVDAIFDKHEVQEIKEKILNSDYDVEDFFEGEFFNFVLTQEGIDVYNAIIGGFVTESGEKIKGLNEYINLYNQKTKQKLPKFKPLYKQVLSDRESLSFYGEGYTSDEEVLEVFRNTLNKNSEIFSSIKKLEKLFKNFDEYSSAGIFVKNGPAISTISKDIFGEWNVIRDKWNAEYDDIHLKKKAVVTEKYEDDRRKSFKKIGSFSLEQLQEYADADLSVVEKLKEIIIQKVDEIYKVYGSSEKLFDADFVLEKSLKKNDAVVAIMKDLLDSVKSFENYIKAFFGEGKETNRDESFYGDFVLAYDILLKVDHIYDAIRNYVTQKPYSKDKFKLYFQNPQFMGGWDKDKETDYRATILRYGSKYYLAIMDKKYAKCLQKIDKDDVNGNYEKINYKLLPGPNKMLPKVFFSKKWMAYYNPSEDIQKIYKNGTFKKGDMFNLNDCHKLIDFFKDSISRYPKWSNAYDFNFSETEKYKDIAGFYREVEEQGYKVSFESASKKEVDKLVEEGKLYMFQIYNKDFSDKSHGTPNLHTMYFKLLFDENNHGQIRLSGGAELFMRRASLKKEELVVHPANSPIANKNPDNPKKTTTLSYDVYKDKRFSEDQYLLHIPIAINKCPKNIFKINTEVRVLLKHDDNPYVIGIDRGERNLLYIVVVDGKGNIVEQYSLNEIINNFNGIRIKTDYHSLLDKKEKERFEARQNWTSIENIKELKAGYISQVVHKICELVEKYDAVIALEDLNSGFKNSRVKVEKQVYQKFEKMLIDKLNYMVDKKSNPCATGGALKGYQITNKFESFKSMSTQNGFIFYIPAWLTSKIDPSTGFVNLLKTKYTSIADSKKFISSFDRIMYVPEEDLFEFALDYKNFSRTDADYIKKWKLYSYGNRIRIFRNPKKNNVFDWEEVCLTSAYKELFNKYGINYQQGDIRALLCEQSDKAFYSSFMALMSLMLQMRNSITGRTDVDFLISPVKNSDGIFYDSRNYEAQENAILPKNADANGAYNIARKVLWAIGQFKKAEDEKLDKVKIAISNKEWLEYAQTSVKHAPAPAPAPAPAPAPAPAPAMVSKGEELFTGVVPILVELDGDVNGHKFSVSGEGEGDATYGKLTLKFICTTGKLPVPWPTLVTTLTYGVQCFSRYPDHMKQHDFFKSAMPEGYVQERTIFFKDDGNYKTRAEVKFEGDTLVNRIELKGIDFKEDGNILGHKLEYNYNSHNVYIMADKQKNGIKVNFKIRHNIEDGSVQLADHYQQNTPIGDGPVLLPDNHYLSTQSALSKDPNEKRDHMVLLEFVTAAGITLGMDELYK

SEQ ID NO: 256 - protein, 1565 aa, synthetic construct
  REGION 1..1565: note = SYNTHETIC
MTQFEGFTNLYQVSKTLRFELIPQGKTLKHIQEQGFIEEDKARNDHYKELKPIIDRIYKTYADQCLQLVQLDWENLSMSKLEKFTNCYSLSKTLRFKAIPVGKTQENIDNKRLLVEDEKRAEDYKGVKKLLDRYYLSFINDVLHSIKLKNLNNYISLFRKKTRTEKENKELENLEINLRKEIAKAFKGNEGYKSLFKKDIIETILPEFLDDKDEIALVNSFNGFTTAFTGFFDNRENMFSEEAKSTSIAFRCINENLTRYISNMDIFEKVDAIFDKHEVQEIKEKILNSDYDVEDFFEGEFFNFVLTQEGIDVYNAIIGGFVTESGEKIKGLNEYINLYNQKTKQKLPKFKPLYKQVLSDRESLSFYGEGYTSDEEVLEVFRNTLNKNSEIFSSIKKLEKLFKNFDEYSSAGIFVKNGPAISTISKDIFGEWNVIRDKWNAEYDDIHLKKKAVVTEKYEDDRRKSFKKIGSFSLEQLQEYADADLSVVEKLKEIIIQKVDEIYKVYGSSEKLFDADFVLEKSLKKNDAVVAIMKDLLDSVKSFENYIKAFFGEGKETNRDESFYGDFVLAYDILLKVDHIYDAIRNYVTQKPYSKDKFKLYFQNPQFMGGWDKDKETDYRATILRYGSKYYLAIMDKKYAKCLQKIDKDDVNGNYEKINYKLLPGPNKMLPKVFFSKKWMAYYNPSEDIQKIYKNGTFKKGDMFNLNDCHKLIDFFKDSISRYPKWSNAYDFNFSETEKYKDIAGFYREVEEQGYKVSFESASKKEVDKLVEEGKLYMFQIYNKDFSDKSHGTPNLHTMYFKLLFDENNHGQIRLSGGAELFMRRASLKKEELVVHPANSPIANKNPDNPKKTTTLSYDVYKDKRFSEDQYLLHIPIAINKCPKNIFKINTEVRVLLKHDDNPYVIGIDRGERNLLYIVVVDGKGNIVEQYSLNEIINNFNGIRIKTDYHSLLDKKEKERFEARQNWTSIENIKELKAGYISQVVHKICELVEKYDAVIALEDLNSGFKNSRVKVEKQVYQKFEKMLIDKLNYMVDKKSNPCATGGALKGYQITNKFESFKSMSTQNGFIFYIPAWLTSKIDPSTGFVNLLKTKYTSIADSKKFISSFDRIMYVPEEDLFEFALDYKNFSRTDADYIKKWKLYSYGNRIRIFRNPKKNNVFDWEEVCLTSAYKELFNKYGINYQQGDIRALLCEQSDKAFYSSFMALMSLMLQMRNSITGRTDVDFLISPVKNSDGIFYDSRNYEAQENAILPKNADANGAYNIARKVLWAIGQFKKAEDEKLDKVKIAISNKEWLEYAQTSVKHAPAPAPAPAPAPAPAPAPAPAMVSKGEELFTGVVPILVELDGDVNGHKFSVSGEGEGDATYGKLTLKFICTTGKLPVPWPTLVTTLTYGVQCFSRYPDHMKQHDFFKSAMPEGYVQERTIFFKDDGNYKTRAEVKFEGDTLVNRIELKGIDFKEDGNILGHKLEYNYNSHNVYIMADKQKNGIKVNFKIRHNIEDGSVQLADHYQQNTPIGDGPVLLPDNHYLSTQSALSKDPNEKRDHMVLLEFVTAAGITLGMDELYK

SEQ ID NO: 257 - protein, 1490 aa, synthetic construct
  REGION 1..1490: note = SYNTHETIC
MSKLEKFTNCYSLSKTLRFKAIPVGKTQENIDNKRLLVEDEKRAEDYKGVKKLLDRYYLSFINDVLHSIKLKNLNNYISLFRKKTRTEKENKELENLEINLRKEIAKAFKGNEGYKSLFKKDIIETILPEFLDDKDEIALVNSFNGFTTAFTGFFDNRENMFSEEAKSTSIAFRCINENLTRYISNMDIFEKVDAIFDKHEVQEIKEKILNSDYDVEDFFEGEFFNFVLTQEGIDVYNAIIGGFVTESGEKIKGLNEYINLYNQKTKQKLPKFKPLYKQVLSDRESLSFYGEGYTSDEEVLEVFRNTLNKNSEIFSSIKKLEKLFKNFDEYSSAGIFVKNGPAISTISKDIFGEWNVIRDKWNAEYDDIHLKKKAVVTEKYEDDRRKSFKKIGSFSLEQLQEYADADLSVVEKLKEIIIQKVDEIYKVYGSSEKLFDADFVLEKSLKKNDAVVAIMKDLLDSVKSFENYIKAFFGEGKETNRDESFYGDFVLAYDILLKVDHIYDAIRNYVTQKPYSKDKFKLYFQNPQFMGGWDKDKETDYRATILRYGSKYYLAIMDKKYAKCLQKIDKDDVNGNYEKINYKLLPGPNKMLPKVFFSKKWMAYYNPSEDIQKIYKNGTFKKGDMFNLNDCHKLIDFFKDSISRYPKWSNAYDFNFSETEKYKDIAGFYREVEEQGYKVSFESASKKEVDKLVEEGKLYMFQIYNKDFSDKSHGTPNLHTMYFKLLFDENNHGQIRLSGGAELFMRRASLKKEELVVHPANSPIANKNPDNPKKTTTLSYDVYKDKRFSEDQYLLHIPIAINKCPKNIFKINTEVRVLLKHDDNPYVIGIDRGERNLLYIVVVDGKGNIVEQYSLNEIINNFNGIRIKTDYHSLLDKKEKERFEARQNWTSIENIKELKAGYISQVVHKICELVEKYDAVIALEDLNSGFKNSRVKVEKQVYQKFEKMLIDKLNYMVDKKSNPCATGGALKGYQITNKFESFKSMSTQNGFIFYIPAWLTSKIDPSTGFVNLLKTKYTSIADSKKFISSFDRIMYVPEEDLFEFALDYKNFSRTDADYIKKWKLYSYGNRIRIFRNPKKNNVFDWEEVCLTSAYKELFNKYGINYQQGDIRALLCEQSDKAFYSSFMALMSLMLQMRNSITGRTDVDFLISPVKNSDGIFYDSRNYEAQENAILPKNADANGAYNIARKVLWAIGQFKKAEDEKLDKVKIAISNKEWLEYAQTSVKHAPAPAPAPAPAPAPAPAPAPAPAMVSKGEELFTGVVPILVELDGDVNGHKFSVSGEGEGDATYGKLTLKFICTTGKLPVPWPTLVTTLTYGVQCFSRYPDHMKQHDFFKSAMPEGYVQERTIFFKDDGNYKTRAEVKFEGDTLVNRIELKGIDFKEDGNILGHKLEYNYNSHNVYIMADKQKNGIKVNFKIRHNIEDGSVQLADHYQQNTPIGDGPVLLPDNHYLSTQSALSKDPNEKRDHMVLLEFVTAAGITLGMDELYK

SEQ ID NO: 258 - protein, 1492 aa, synthetic construct
  REGION 1..1492: note = SYNTHETIC
MSKLEKFTNCYSLSKTLRFKAIPVGKTQENIDNKRLLVEDEKRAEDYKGVKKLLDRYYLSFINDVLHSIKLKNLNNYISLFRKKTRTEKENKELENLEINLRKEIAKAFKGNEGYKSLFKKDIIETILPEFLDDKDEIALVNSFNGFTTAFTGFFDNRENMFSEEAKSTSIAFRCINENLTRYISNMDIFEKVDAIFDKHEVQEIKEKILNSDYDVEDFFEGEFFNFVLTQEGIDVYNAIIGGFVTESGEKIKGLNEYINLYNQKTKQKLPKFKPLYKQVLSDRESLSFYGEGYTSDEEVLEVFRNTLNKNSEIFSSIKKLEKLFKNFDEYSSAGIFVKNGPAISTISKDIFGEWNVIRDKWNAEYDDIHLKKKAVVTEKYEDDRRKSFKKIGSFSLEQLQEYADADLSVVEKLKEIIIQKVDEIYKVYGSSEKLFDADFVLEKSLKKNDAVVAIMKDLLDSVKSFENYIKAFFGEGKETNRDESFYGDFVLAYDILLKVDHIYDAIRNYVTQKPYSKDKFKLYFQNPQFMGGWDKDKETDYRATILRYGSKYYLAIMDKKYAKCLQKIDKDDVNGNYEKINYKLLPGPNKMLPKVFFSKKWMAYYNPSEDIQKIYKNGTFKKGDMFNLNDCHKLIDFFKDSISRYPKWSNAYDFNFSETEKYKDIAGFYREVEEQGYKVSFESASKKEVDKLVEEGKLYMFQIYNKDFSDKSHGTPNLHTMYFKLLFDENNHGQIRLSGGAELFMRRASLKKEELVVHPANSPIANKNPDNPKKTTTLSYDVYKDKRFSEDQYLLHIPIAINKCPKNIFKINTEVRVLLKHDDNPYVIGIDRGERNLLYIVVVDGKGNIVEQYSLNEIINNFNGIRIKTDYHSLLDKKEKERFEARQNWTSIENIKELKAGYISQVVHKICELVEKYDAVIALEDLNSGFKNSRVKVEKQVYQKFEKMLIDKLNYMVDKKSNPCATGGALKGYQITNKFESFKSMSTQNGFIFYIPAWLTSKIDPSTGFVNLLKTKYTSIADSKKFISSFDRIMYVPEEDLFEFALDYKNFSRTDADYIKKWKLYSYGNRIRIFRNPKKNNVFDWEEVCLTSAYKELFNKYGINYQQGDIRALLCEQSDKAFYSSFMALMSLMLQMRNSITGRTDVDFLISPVKNSDGIFYDSRNYEAQENAILPKNADANGAYNIARKVLWAIGQFKKAEDEKLDKVKIAISNKEWLEYAQTSVKHAPAPAPAPAPAPAPAPAPAPAPAPAMVSKGEELFTGVVPILVELDGDVNGHKFSVSGEGEGDATYGKLTLKFICTTGKLPVPWPTLVTTLTYGVQCFSRYPDHMKQHDFFKSAMPEGYVQERTIFFKDDGNYKTRAEVKFEGDTLVNRIELKGIDFKEDGNILGHKLEYNYNSHNVYIMADKQKNGIKVNFKIRHNIEDGSVQLADHYQQNTPIGDGPVLLPDNHYLSTQSALSKDPNEKRDHMVLLEFVTAAGITLGMDELYK

SEQ ID NO: 259 - protein, 1494 aa, synthetic construct
  REGION 1..1494: note = SYNTHETIC
MSKLEKFTNCYSLSKTLRFKAIPVGKTQENIDNKRLLVEDEKRAEDYKGVKKLLDRYYLSFINDVLHSIKLKNLNNYISLFRKKTRTEKENKELENLEINLRKEIAKAFKGNEGYKSLFKKDIIETILPEFLDDKDEIALVNSFNGFTTAFTGFFDNRENMFSEEAKSTSIAFRCINENLTRYISNMDIFEKVDAIFDKHEVQEIKEKILNSDYDVEDFFEGEFFNFVLTQEGIDVYNAIIGGFVTESGEKIKGLNEYINLYNQKTKQKLPKFKPLYKQVLSDRESLSFYGEGYTSDEEVLEVFRNTLNKNSEIFSSIKKLEKLFKNFDEYSSAGIFVKNGPAISTISKDIFGEWNVIRDKWNAEYDDIHLKKKAVVTEKYEDDRRKSFKKIGSFSLEQLQEYADADLSVVEKLKEIIIQKVDEIYKVYGSSEKLFDADFVLEKSLKKNDAVVAIMKDLLDSVKSFENYIKAFFGEGKETNRDESFYGDFVLAYDILLKVDHIYDAIRNYVTQKPYSKDKFKLYFQNPQFMGGWDKDKETDYRATILRYGSKYYLAIMDKKYAKCLQKIDKDDVNGNYEKINYKLLPGPNKMLPKVFFSKKWMAYYNPSEDIQKIYKNGTFKKGDMFNLNDCHKLIDFFKDSISRYPKWSNAYDFNFSETEKYKDIAGFYREVEEQGYKVSFESASKKEVDKLVEEGKLYMFQIYNKDFSDKSHGTPNLHTMYFKLLFDENNHGQIRLSGGAELFMRRASLKKEELVVHPANSPIANKNPDNPKKTTTLSYDVYKDKRFSEDQYLLHIPIAINKCPKNIFKINTEVRVLLKHDDNPYVIGIDRGERNLLYIVVVDGKGNIVEQYSLNEIINNFNGIRIKTDYHSLLDKKEKERFEARQNWTSIENIKELKAGYISQVVHKICELVEKYDAVIALEDLNSGFKNSRVKVEKQVYQKFEKMLIDKLNYMVDKKSNPCATGGALKGYQITNKFESFKSMSTQNGFIFYIPAWLTSKIDPSTGFVNLLKTKYTSIADSKKFISSFDRIMYVPEEDLFEFALDYKNFSRTDADYIKKWKLYSYGNRIRIFRNPKKNNVFDWEEVCLTSAYKELFNKYGINYQQGDIRALLCEQSDKAFYSSFMALMSLMLQMRNSITGRTDVDFLISPVKNSDGIFYDSRNYEAQENAILPKNADANGAYNIARKVLWAIGQFKKAEDEKLDKVKIAISNKEWLEYAQTSVKHAPAPAPAPAPAPAPAPAPAPAPAPAPAMVSKGEELFTGVVPILVELDGDVNGHKFSVSGEGEGDATYGKLTLKFICTTGKLPVPWPTLVTTLTYGVQCFSRYPDHMKQHDFFKSAMPEGYVQERTIFFKDDGNYKTRAEVKFEGDTLVNRIELKGIDFKEDGNILGHKLEYNYNSHNVYIMADKQKNGIKVNFKIRHNIEDGSVQLADHYQQNTPIGDGPVLLPDNHYLSTQSALSKDPNEKRDHMVLLEFVTAAGITLGMDELYK

SEQ ID NO: 260 - protein, 1496 aa, synthetic construct
  REGION 1..1496: note = SYNTHETIC
MSKLEKFTNCYSLSKTLRFKAIPVGKTQENIDNKRLLVEDEKRAEDYKGVKKLLDRYYLSFINDVLHSIKLKNLNNYISLFRKKTRTEKENKELENLEINLRKEIAKAFKGNEGYKSLFKKDIIETILPEFLDDKDEIALVNSFNGFTTAFTGFFDNRENMFSEEAKSTSIAFRCINENLTRYISNMDIFEKVDAIFDKHEVQEIKEKILNSDYDVEDFFEGEFFNFVLTQEGIDVYNAIIGGFVTESGEKIKGLNEYINLYNQKTKQKLPKFKPLYKQVLSDRESLSFYGEGYTSDEEVLEVFRNTLNKNSEIFSSIKKLEKLFKNFDEYSSAGIFVKNGPAISTISKDIFGEWNVIRDKWNAEYDDIHLKKKAVVTEKYEDDRRKSFKKIGSFSLEQLQEYADADLSVVEKLKEIIIQKVDEIYKVYGSSEKLFDADFVLEKSLKKNDAVVAIMKDLLDSVKSFENYIKAFFGEGKETNRDESFYGDFVLAYDILLKVDHIYDAIRNYVTQKPYSKDKFKLYFQNPQFMGGWDKDKETDYRATILRYGSKYYLAIMDKKYAKCLQKIDKDDVNGNYEKINYKLLPGPNKMLPKVFFSKKWMAYYNPSEDIQKIYKNGTFKKGDMFNLNDCHKLIDFFKDSISRYPKWSNAYDFNFSETEKYKDIAGFYREVEEQGYKVSFESASKKEVDKLVEEGKLYMFQIYNKDFSDKSHGTPNLHTMYFKLLFDENNHGQIRLSGGAELFMRRASLKKEELVVHPANSPIANKNPDNPKKTTTLSYDVYKDKRFSEDQYLLHIPIAINKCPKNIFKINTEVRVLLKHDDNPYVIGIDRGERNLLYIVVVDGKGNIVEQYSLNEIINNFNGIRIKTDYHSLLDKKEKERFEARQNWTSIENIKELKAGYISQVVHKICELVEKYDAVIALEDLNSGFKNSRVKVEKQVYQKFEKMLIDKLNYMVDKKSNPCATGGALKGYQITNKFESFKSMSTQNGFIFYIPAWLTSKIDPSTGFVNLLKTKYTSIADSKKFISSFDRIMYVPEEDLFEFALDYKNFSRTDADYIKKWKLYSYGNRIRIFRNPKKNNVFDWEEVCLTSAYKELFNKYGINYQQGDIRALLCEQSDKAFYSSFMALMSLMLQMRNSITGRTDVDFLISPVKNSDGIFYDSRNYEAQENAILPKNADANGAYNIARKVLWAIGQFKKAEDEKLDKVKIAISNKEWLEYAQTSVKHAPAPAPAPAPAPAPAPAPAPAPAPAPAPAMVSKGEELFTGVVPILVELDGDVNGHKFSVSGEGEGDATYGKLTLKFICTTGKLPVPWPTLVTTLTYGVQCFSRYPDHMKQHDFFKSAMPEGYVQERTIFFKDDGNYKTRAEVKFEGDTLVNRIELKGIDFKEDGNILGHKLEYNYNSHNVYIMADKQKNGIKVNFKIRHNIEDGSVQLADHYQQNTPIGDGPVLLPDNHYLSTQSALSKDPNEKRDHMVLLEFVTAAGITLGMDELYK

SEQ ID NO: 261 - protein, 1469 aa, synthetic construct
  REGION 1..1469: note = SYNTHETIC
  VARIANT 1229: note = X can be any naturally occurring amino acid
MSKLEKFTNCYSLSKTLRFKAIPVGKTQENIDNKRLLVEDEKRAEDYKGVKKLLDRYYLSFINDVLHSIKLKNLNNYISLFRKKTRTEKENKELENLEINLRKEIAKAFKGNEGYKSLFKKDIIETILPEFLDDKDEIALVNSFNGFTTAFTGFFDNRENMFSEEAKSTSIAFRCINENLTRYISNMDIFEKVDAIFDKHEVQEIKEKILNSDYDVEDFFEGEFFNFVLTQEGIDVYNAIIGGFVTESGEKIKGLNEYINLYNQKTKQKLPKFKPLYKQVLSDRESLSFYGEGYTSDEEVLEVFRNTLNKNSEIFSSIKKLEKLFKNFDEYSSAGIFVKNGPAISTISKDIFGEWNVIRDKWNAEYDDIHLKKKAVVTEKYEDDRRKSFKKIGSFSLEQLQEYADADLSVVEKLKEIIIQKVDEIYKVYGSSEKLFDADFVLEKSLKKNDAVVAIMKDLLDSVKSFENYIKAFFGEGKETNRDESFYGDFVLAYDILLKVDHIYDAIRNYVTQKPYSKDKFKLYFQNPQFMGGWDKDKETDYRATILRYGSKYYLAIMDKKYAKCLQKIDKDDVNGNYEKINYKLLPGPNKMLPKVFFSKKWMAYYNPSEDIQKIYKNGTFKKGDMFNLNDCHKLIDFFKDSISRYPKWSNAYDFNFSETEKYKDIAGFYREVEEQGYKVSFESASKKEVDKLVEEGKLYMFQIYNKDFSDKSHGTPNLHTMYFKLLFDENNHGQIRLSGGAELFMRRASLKKEELVVHPANSPIANKNPDNPKKTTTLSYDVYKDKRFSEDQYLLHIPIAINKCPKNIFKINTEVRVLLKHDDNPYVIGIDRGERNLLYIVVVDGKGNIVEQYSLNEIINNFNGIRIKTDYHSLLDKKEKERFEARQNWTSIENIKELKAGYISQVVHKICELVEKYDAVIALEDLNSGFKNSRVKVEKQVYQKFEKMLIDKLNYMVDKKSNPCATGGALKGYQITNKFESFKSMSTQNGFIFYIPAWLTSKIDPSTGFVNLLKTKYTSIADSKKFISSFDRIMYVPEEDLFEFALDYKNFSRTDADYIKKWKLYSYGNRIRIFRNPKKNNVFDWEEVCLTSAYKELFNKYGINYQQGDIRALLCEQSDKAFYSSFMALMSLMLQMRNSITGRTDVDFLISPVKNSDGIFYDSRNYEAQENAILPKNADANGAYNIARKVLWAIGQFKKAEDEKLDKVKIAISNKEWLEYAQTSVKHXPMVSKGEELFTGVVPILVELDGDVNGHKFSVSGEGEGDATYGKLTLKFICTTGKLPVPWPTLVTTLTYGVQCFSRYPDHMKQHDFFKSAMPEGYVQERTIFFKDDGNYKTRAEVKFEGDTLVNRIELKGIDFKEDGNILGHKLEYNYNSHNVYIMADKQKNGIKVNFKIRHNIEDGSVQLADHYQQNTPIGDGPVLLPDNHYLSTQSALSKDPNEKRDHMVLLEFVTAAGITLGMDELYK

SEQ ID NO: 262 - protein, 1471 aa, synthetic construct
  REGION 1..1471: note = SYNTHETIC
  VARIANT 1229: note = X can be any naturally occurring amino acid
  VARIANT 1231: note = X can be any naturally occurring amino acid
MSKLEKFTNCYSLSKTLRFKAIPVGKTQENIDNKRLLVEDEKRAEDYKGVKKLLDRYYLSFINDVLHSIKLKNLNNYISLFRKKTRTEKENKELENLEINLRKEIAKAFKGNEGYKSLFKKDIIETILPEFLDDKDEIALVNSFNGFTTAFTGFFDNRENMFSEEAKSTSIAFRCINENLTRYISNMDIFEKVDAIFDKHEVQEIKEKILNSDYDVEDFFEGEFFNFVLTQEGIDVYNAIIGGFVTESGEKIKGLNEYINLYNQKTKQKLPKFKPLYKQVLSDRESLSFYGEGYTSDEEVLEVFRNTLNKNSEIFSSIKKLEKLFKNFDEYSSAGIFVKNGPAISTISKDIFGEWNVIRDKWNAEYDDIHLKKKAVVTEKYEDDRRKSFKKIGSFSLEQLQEYADADLSVVEKLKEIIIQKVDEIYKVYGSSEKLFDADFVLEKSLKKNDAVVAIMKDLLDSVKSFENYIKAFFGEGKETNRDESFYGDFVLAYDILLKVDHIYDAIRNYVTQKPYSKDKFKLYFQNPQFMGGWDKDKETDYRATILRYGSKYYLAIMDKKYAKCLQKIDKDDVNGNYEKINYKLLPGPNKMLPKVFFSKKWMAYYNPSEDIQKIYKNGTFKKGDMFNLNDCHKLIDFFKDSISRYPKWSNAYDFNFSETEKYKDIAGFYREVEEQGYKVSFESASKKEVDKLVEEGKLYMFQIYNKDFSDKSHGTPNLHTMYFKLLFDENNHGQIRLSGGAELFMRRASLKKEELVVHPANSPIANKNPDNPKKTTTLSYDVYKDKRFSEDQYLLHIPIAINKCPKNIFKINTEVRVLLKHDDNPYVIGIDRGERNLLYIVVVDGKGNIVEQYSLNEIINNFNGIRIKTDYHSLLDKKEKERFEARQNWTSIENIKELKAGYISQVVHKICELVEKYDAVIALEDLNSGFKNSRVKVEKQVYQKFEKMLIDKLNYMVDKKSNPCATGGALKGYQITNKFESFKSMSTQNGFIFYIPAWLTSKIDPSTGFVNLLKTKYTSIADSKKFISSFDRIMYVPEEDLFEFALDYKNFSRTDADYIKKWKLYSYGNRIRIFRNPKKNNVFDWEEVCLTSAYKELFNKYGINYQQGDIRALLCEQSDKAFYSSFMALMSLMLQMRNSITGRTDVDFLISPVKNSDGIFYDSRNYEAQENAILPKNADANGAYNIARKVLWAIGQFKKAEDEKLDKVKIAISNKEWLEYAQTSVKHXPXPMVSKGEELFTGVVPILVELDGDVNGHKFSVSGEGEGDATYGKLTLKFICTTGKLPVPWPTLVTTLTYGVQCFSRYPDHMKQHDFFKSAMPEGYVQERTIFFKDDGNYKTRAEVKFEGDTLVNRIELKGIDFKEDGNILGHKLEYNYNSHNVYIMADKQKNGIKVNFKIRHNIEDGSVQLADHYQQNTPIGDGPVLLPDNHYLSTQSALSKDPNEKRDHMVLLEFVTAAGITLGMDELYK

SEQ ID NO: 263 - protein, 1473 aa, synthetic construct
  REGION 1..1473: note = SYNTHETIC
  VARIANT 1229: note = X can be any naturally occurring amino acid
  VARIANT 1231: note = X can be any naturally occurring amino acid
  VARIANT 1233: note = X can be any naturally occurring amino acid
MSKLEKFTNCYSLSKTLRFKAIPVGKTQENIDNKRLLVEDEKRAEDYKGVKKLLDRYYLSFINDVLHSIKLKNLNNYISLFRKKTRTEKENKELENLEINLRKEIAKAFKGNEGYKSLFKKDIIETILPEFLDDKDEIALVNSFNGFTTAFTGFFDNRENMFSEEAKSTSIAFRCINENLTRYISNMDIFEKVDAIFDKHEVQEIKEKILNSDYDVEDFFEGEFFNFVLTQEGIDVYNAIIGGFVTESGEKIKGLNEYINLYNQKTKQKLPKFKPLYKQVLSDRESLSFYGEGYTSDEEVLEVFRNTLNKNSEIFSSIKKLEKLFKNFDEYSSAGIFVKNGPAISTISKDIFGEWNVIRDKWNAEYDDIHLKKKAVVTEKYEDDRRKSFKKIGSFSLEQLQEYADADLSVVEKLKEIIIQKVDEIYKVYGSSEKLFDADFVLEKSLKKNDAVVAIMKDLLDSVKSFENYIKAFFGEGKETNRDESFYGDFVLAYDILLKVDHIYDAIRNYVTQKPYSKDKFKLYFQNPQFMGGWDKDKETDYRATILRYGSKYYLAIMDKKYAKCLQKIDKDDVNGNYEKINYKLLPGPNKMLPKVFFSKKWMAYYNPSEDIQKIYKNGTFKKGDMFNLNDCHKLIDFFKDSISRYPKWSNAYDFNFSETEKYKDIAGFYREVEEQGYKVSFESASKKEVDKLVEEGKLYMFQIYNKDFSDKSHGTPNLHTMYFKLLFDENNHGQIRLSGGAELFMRRASLKKEELVVHPANSPIANKNPDNPKKTTTLSYDVYKDKRFSEDQYLLHIPIAINKCPKNIFKINTEVRVLLKHDDNPYVIGIDRGERNLLYIVVVDGKGNIVEQYSLNEIINNFNGIRIKTDYHSLLDKKEKERFEARQNWTSIENIKELKAGYISQVVHKICELVEKYDAVIALEDLNSGFKNSRVKVEKQVYQKFEKMLIDKLNYMVDKKSNPCATGGALKGYQITNKFESFKSMSTQNGFIFYIPAWLTSKIDPSTGFVNLLKTKYTSIADSKKFISSFDRIMYVPEEDLFEFALDYKNFSRTDADYIKKWKLYSYGNRIRIFRNPKKNNVFDWEEVCLTSAYKELFNKYGINYQQGDIRALLCEQSDKAFYSSFMALMSLMLQMRNSITGRTDVDFLISPVKNSDGIFYDSRNYEAQENAILPKNADANGAYNIARKVLWAIGQFKKAEDEKLDKVKIAISNKEWLEYAQTSVKHXPXPXPMVSKGEELFTGVVPILVELDGDVNGHKFSVSGEGEGDATYGKLTLKFICTTGKLPVPWPTLVTTLTYGVQCFSRYPDHMKQHDFFKSAMPEGYVQERTIFFKDDGNYKTRAEVKFEGDTLVNRIELKGIDFKEDGNILGHKLEYNYNSHNVYIMADKQKNGIKVNFKIRHNIEDGSVQLADHYQQNTPIGDGPVLLPDNHYLSTQSALSKDPNEKRDHMVLLEFVTAAGITLGMDELYK

SEQ ID NO: 264 - protein, 1475 aa, synthetic construct
  REGION 1..1475: note = SYNTHETIC
  VARIANT 1229: note = X can be any naturally occurring amino acid
  VARIANT 1231: note = X can be any naturally occurring amino acid
  VARIANT 1233: note = X can be any naturally occurring amino acid
  VARIANT 1235: note = X can be any naturally occurring amino acid
MSKLEKFTNCYSLSKTLRFKAIPVGKTQENIDNKRLLVEDEKRAEDYKGVKKLLDRYYLSFINDVLHSIKLKNLNNYISLFRKKTRTEKENKELENLEINLRKEIAKAFKGNEGYKSLFKKDIIETILPEFLDDKDEIALVNSFNGFTTAFTGFFDNRENMFSEEAKSTSIAFRCINENLTRYISNMDIFEKVDAIFDKHEVQEIKEKILNSDYDVEDFFEGEFFNFVLTQEGIDVYNAIIGGFVTESGEKIKGLNEYINLYNQKTKQKLPKFKPLYKQVLSDRESLSFYGEGYTSDEEVLEVFRNTLNKNSEIFSSIKKLEKLFKNFDEYSSAGIFVKNGPAISTISKDIFGEWNVIRDKWNAEYDDIHLKKKAVVTEKYEDDRRKSFKKIGSFSLEQLQEYADADLSVVEKLKEIIIQKVDEIYKVYGSSEKLFDADFVLEKSLKKNDAVVAIMKDLLDSVKSFENYIKAFFGEGKETNRDESFYGDFVLAYDILLKVDHIYDAIRNYVTQKPYSKDKFKLYFQNPQFMGGWDKDKETDYRATILRYGSKYYLAIMDKKYAKCLQKIDKDDVNGNYEKINYKLLPGPNKMLPKVFFSKKWMAYYNPSEDIQKIYKNGTFKKGDMFNLNDCHKLIDFFKDSISRYPKWSNAYDFNFSETEKYKDIAGFYREVEEQGYKVSFESASKKEVDKLVEEGKLYMFQIYNKDFSDKSHGTPNLHTMYFKLLFDENNHGQIRLSGGAELFMRRASLKKEELVVHPANSPIANKNPDNPKKTTTLSYDVYKDKRFSEDQYLLHIPIAINKCPKNIFKINTEVRVLLKHDDNPYVIGIDRGERNLLYIVVVDGKGNIVEQYSLNEIINNFNGIRIKTDYHSLLDKKEKERFEARQNWTSIENIKELKAGYISQVVHKICELVEKYDAVIALEDLNSGFKNSRVKVEKQVYQKFEKMLIDKLNYMVDKKSNPCATGGALKGYQITNKFESFKSMSTQNGFIFYIPAWLTSKIDPSTGFVNLLKTKYTSIADSKKFISSFDRIMYVPEEDLFEFALDYKNFSRTDADYIKKWKLYSYGNRIRIFRNPKKNNVFDWEEVCLTSAYKELFNKYGINYQQGDIRALLCEQSDKAFYSSFMALMSLMLQMRNSITGRTDVDFLISPVKNSDGIFYDSRNYEAQENAILPKNADANGAYNIARKVLWAIGQFKKAEDEKLDKVKIAISNKEWLEYAQTSVKHXPXPXPXPMVSKGEELFTGVVPILVELDGDVNGHKFSVSGEGEGDATYGKLTLKFICTTGKLPVPWPTLVTTLTYGVQCFSRYPDHMKQHDFFKSAMPEGYVQERTIFFKDDGNYKTRAEVKFEGDTLVNRIELKGIDFKEDGNILGHKLEYNYNSHNVYIMADKQKNGIKVNFKIRHNIEDGSVQLADHYQQNTPIGDGPVLLPDNHYLSTQSALSKDPNEKRDHMVLLEFVTAAGITLGMDELYK

SEQ ID NO: 265 - protein, 1477 aa, synthetic construct
  REGION 1..1477: note = SYNTHETIC
  VARIANT 1229: note = X can be any naturally occurring amino acid
  VARIANT 1231: note = X can be any naturally occurring amino acid
  VARIANT 1233: note = X can be any naturally occurring amino acid
  VARIANT 1235: note = X can be any naturally occurring amino acid
  VARIANT 1237: note = X can be any naturally occurring amino acid
MSKLEKFTNCYSLSKTLRFKAIPVGKTQENIDNKRLLVEDEKRAEDYKGVKKLLDRYYLSFINDVLHSIKLKNLNNYISLFRKKTRTEKENKELENLEINLRKEIAKAFKGNEGYKSLFKKDIIETILPEFLDDKDEIALVNSFNGFTTAFTGFFDNRENMFSEEAKSTSIAFRCINENLTRYISNMDIFEKVDAIFDKHEVQEIKEKILNSDYDVEDFFEGEFFNFVLTQEGIDVYNAIIGGFVTESGEKIKGLNEYINLYNQKTKQKLPKFKPLYKQVLSDRESLSFYGEGYTSDEEVLEVFRNTLNKNSEIFSSIKKLEKLFKNFDEYSSAGIFVKNGPAISTISKDIFGEWNVIRDKWNAEYDDIHLKKKAVVTEKYEDDRRKSFKKIGSFSLEQLQEYADADLSVVEKLKEIIIQKVDEIYKVYGSSEKLFDADFVLEKSLKKNDAVVAIMKDLLDSVKSFENYIKAFFGEGKETNRDESFYGDFVLAYDILLKVDHIYDAIRNYVTQKPYSKDKFKLYFQNPQFMGGWDKDKETDYRATILRYGSKYYLAIMDKKYAKCLQKIDKDDVNGNYEKINYKLLPGPNKMLPKVFFSKKWMAYYNPSEDIQKIYKNGTFKKGDMFNLNDCHKLIDFFKDSISRYPKWSNAYDFNFSETEKYKDIAGFYREVEEQGYKVSFESASKKEVDKLVEEGKLYMFQIYNKDFSDKSHGTPNLHTMYFKLLFDENNHGQIRLSGGAELFMRRASLKKEELVVHPANSPIANKNPDNPKKTTTLSYDVYKDKRFSEDQYLLHIPIAINKCPKNIFKINTEVRVLLKHDDNPYVIGIDRGERNLLYIVVVDGKGNIVEQYSLNEIINNFNGIRIKTDYHSLLDKKEKERFEARQNWTSIENIKELKAGYISQVVHKICELVEKYDAVIALEDLNSGFKNSRVKVEKQVYQKFEKMLIDKLNYMVDKKSNPCATGGALKGYQITNKFESFKSMSTQNGFIFYIPAWLTSKIDPSTGFVNLLKTKYTSIADSKKFISSFDRIMYVPEEDLFEFALDYKNFSRTDADYIKKWKLYSYGNRIRIFRNPKKNNVFDWEEVCLTSAYKELFNKYGINYQQGDIRALLCEQSDKAFYSSFMALMSLMLQMRNSITGRTDVDFLISPVKNSDGIFYDSRNYEAQENAILPKNADANGAYNIARKVLWAIGQFKKAEDEKLDKVKIAISNKEWLEYAQTSVKHXPXPXPXPXPMVSKGEELFTGVVPILVELDGDVNGHKFSVSGEGEGDATYGKLTLKFICTTGKLPVPWPTLVTTLTYGVQCFSRYPDHMKQHDFFKSAMPEGYVQERTIFFKDDGNYKTRAEVKFEGDTLVNRIELKGIDFKEDGNILGHKLEYNYNSHNVYIMADKQKNGIKVNFKIRHNIEDGSVQLADHYQQNTPIGDGPVLLPDNHYLSTQSALSKDPNEKRDHMVLLEFVTAAGITLGMDELYK

SEQ ID NO: 266 - protein, 1479 aa, synthetic construct
  REGION 1..1479: note = SYNTHETIC
  VARIANT 1229: note = X can be any naturally occurring amino acid
  VARIANT 1231: note = X can be any naturally occurring amino acid
  VARIANT 1233: note = X can be any naturally occurring amino acid
  VARIANT 1235: note = X can be any naturally occurring amino acid
  VARIANT 1237: note = X can be any naturally occurring amino acid
  VARIANT 1239: note = X can be any naturally occurring amino acid
MSKLEKFTNCYSLSKTLRFKAIPVGKTQENIDNKRLLVEDEKRAEDYKGVKKLLDRYYLSFINDVLHSIKLKNLNNYISLFRKKTRTEKENKELENLEINLRKEIAKAFKGNEGYKSLFKKDIIETILPEFLDDKDEIALVNSFNGFTTAFTGFFDNRENMFSEEAKSTSIAFRCINENLTRYISNMDIFEKVDAIFDKHEVQEIKEKILNSDYDVEDFFEGEFFNFVLTQEGIDVYNAIIGGFVTESGEKIKGLNEYINLYNQKTKQKLPKFKPLYKQVLSDRESLSFYGEGYTSDEEVLEVFRNTLNKNSEIFSSIKKLEKLFKNFDEYSSAGIFVKNGPAISTISKDIFGEWNVIRDKWNAEYDDIHLKKKAVVTEKYEDDRRKSFKKIGSFSLEQLQEYADADLSVVEKLKEIIIQKVDEIYKVYGSSEKLFDADFVLEKSLKKNDAVVAIMKDLLDSVKSFENYIKAFFGEGKETNRDESFYGDFVLAYDILLKVDHIYDAIRNYVTQKPYSKDKFKLYFQNPQFMGGWDKDKETDYRATILRYGSKYYLAIMDKKYAKCLQKIDKDDVNGNYEKINYKLLPGPNKMLPKVFFSKKWMAYYNPSEDIQKIYKNGTFKKGDMFNLNDCHKLIDFFKDSISRYPKWSNAYDFNFSETEKYKDIAGFYREVEEQGYKVSFESASKKEVDKLVEEGKLYMFQIYNKDFSDKSHGTPNLHTMYFKLLFDENNHGQIRLSGGAELFMRRASLKKEELVVHPANSPIANKNPDNPKKTTTLSYDVYKDKRFSEDQYLLHIPIAINKCPKNIFKINTEVRVLLKHDDNPYVIGIDRGERNLLYIVVVDGKGNIVEQYSLNEIINNFNGIRIKTDYHSLLDKKEKERFEARQNWTSIENIKELKAGYISQVVHKICELVEKYDAVIALEDLNSGFKNSRVKVEKQVYQKFEKMLIDKLNYMVDKKSNPCATGGALKGYQITNKFESFKSMSTQNGFIFYIPAWLTSKIDPSTGFVNLLKTKYTSIADSKKFISSFDRIMYVPEEDLFEFALDYKNFSRTDADYIKKWKLYSYGNRIRIFRNPKKNNVFDWEEVCLTSAYKELFNKYGINYQQGDIRALLCEQSDKAFYSSFMALMSLMLQMRNSITGRTDVDFLISPVKNSDGIFYDSRNYEAQENAILPKNADANGAYNIARKVLWAIGQFKKAEDEKLDKVKIAISNKEWLEYAQTSVKHXPXPXPXPXPXPMVSKGEELFTGVVPILVELDGDVNGHKFSVSGEGEGDATYGKLTLKFICTTGKLPVPWPTLVTTLTYGVQCFSRYPDHMKQHDFFKSAMPEGYVQERTIFFKDDGNYKTRAEVKFEGDTLVNRIELKGIDFKEDGNILGHKLEYNYNSHNVYIMADKQKNGIKVNFKIRHNIEDGSVQLADHYQQNTPIGDGPVLLPDNHYLSTQSALSKDPNEKRDHMVLLEFVTAAGITLGMDELYK

SEQ ID NO: 267 - protein, 1481 aa, synthetic construct
  REGION 1..1481: note = SYNTHETIC
  VARIANT 1229: note = X can be any naturally occurring amino acid
  VARIANT 1231: note = X can be any naturally occurring amino acid
  VARIANT 1233: note = X can be any naturally occurring amino acid
  VARIANT 1235: note = X can be any naturally occurring amino acid
  VARIANT 1237: note = X can be any naturally occurring amino acid
  VARIANT 1239: note = X can be any naturally occurring amino acid
  VARIANT 1241: note = X can be any naturally occurring amino acid
MSKLEKFTNCYSLSKTLRFKAIPVGKTQENIDNKRLLVEDEKRAEDYKGVKKLLDRYYLSFINDVLHSIKLKNLNNYISLFRKKTRTEKENKELENLEINLRKEIAKAFKGNEGYKSLFKKDIIETILPEFLDDKDEIALVNSFNGFTTAFTGFFDNRENMFSEEAKSTSIAFRCINENLTRYISNMDIFEKVDAIFDKHEVQEIKEKILNSDYDVEDFFEGEFFNFVLTQEGIDVYNAIIGGFVTESGEKIKGLNEYINLYNQKTKQKLPKFKPLYKQVLSDRESLSFYGEGYTSDEEVLEVFRNTLNKNSEIFSSIKKLEKLFKNFDEYSSAGIFVKNGPAISTISKDIFGEWNVIRDKWNAEYDDIHLKKKAVVTEKYEDDRRKSFKKIGSFSLEQLQEYADADLSVVEKLKEIIIQKVDEIYKVYGSSEKLFDADFVLEKSLKKNDAVVAIMKDLLDSVKSFENYIKAFFGEGKETNRDESFYGDFVLAYDILLKVDHIYDAIRNYVTQKPYSKDKFKLYFQNPQFMGGWDKDKETDYRATILRYGSKYYLAIMDKKYAKCLQKIDKDDVNGNYEKINYKLLPGPNKMLPKVFFSKKWMAYYNPSEDIQKIYKNGTFKKGDMFNLNDCHKLIDFFKDSISRYPKWSNAYDFNFSETEKYKDIAGFYREVEEQGYKVSFESASKKEVDKLVEEGKLYMFQIYNKDFSDKSHGTPNLHTMYFKLLFDENNHGQIRLSGGAELFMRRASLKKEELVVHPANSPIANKNPDNPKKTTTLSYDVYKDKRFSEDQYLLHIPIAINKCPKNIFKINTEVRVLLKHDDNPYVIGIDRGERNLLYIVVVDGKGNIVEQYSLNEIINNFNGIRIKTDYHSLLDKKEKERFEARQNWTSIENIKELKAGYISQVVHKICELVEKYDAVIALEDLNSGFKNSRVKVEKQVYQKFEKMLIDKLNYMVDKKSNPCATGGALKGYQITNKFESFKSMSTQNGFIFYIPAWLTSKIDPSTGFVNLLKTKYTSIADSKKFISSFDRIMYVPEEDLFEFALDYKNFSRTDADYIKKWKLYSYGNRIRIFRNPKKNNVFDWEEVCLTSAYKELFNKYGINYQQGDIRALLCEQSDKAFYSSFMALMSLMLQMRNSITGRTDVDFLISPVKNSDGIFYDSRNYEAQENAILPKNADANGAYNIARKVLWAIGQFKKAEDEKLDKVKIAISNKEWLEYAQTSVKHXPXPXPXPXPXPXPMVSKGEELFTGVVPILVELDGDVNGHKFSVSGEGEGDATYGKLTLKFICTTGKLPVPWPTLVTTLTYGVQCFSRYPDHMKQHDFFKSAMPEGYVQERTIFFKDDGNYKTRAEVKFEGDTLVNRIELKGIDFKEDGNILGHKLEYNYNSHNVYIMADKQKNGIKVNFKIRHNIEDGSVQLADHYQQNTPIGDGPVLLPDNHYLSTQSALSKDPNEKRDHMVLLEFVTAAGITLGMDELYK

SEQ ID NO: 268 - protein, 1483 aa, synthetic construct
  REGION 1..1483: note = SYNTHETIC
  VARIANT 1229: note = X can be any naturally occurring amino acid
  VARIANT 1231: note = X can be any naturally occurring amino acid
  VARIANT 1233: note = X can be any naturally occurring amino acid
  VARIANT 1235: note = X can be any naturally occurring amino acid; note = X can be any naturally occurring amino acid
  VARIANT 1237: note = X can be any naturally occurring amino acid
  VARIANT 1239: note = X can be any naturally occurring amino acid
  VARIANT 1241: note = X can be any naturally occurring amino acid
  VARIANT 1243: note = X can be any naturally occurring amino acid
MSKLEKFTNCYSLSKTLRFKAIPVGKTQENIDNKRLLVEDEKRAEDYKGVKKLLDRYYLSFINDVLHSIKLKNLNNYISLFRKKTRTEKENKELENLEINLRKEIAKAFKGNEGYKSLFKKDIIETILPEFLDDKDEIALVNSFNGFTTAFTGFFDNRENMFSEEAKSTSIAFRCINENLTRYISNMDIFEKVDAIFDKHEVQEIKEKILNSDYDVEDFFEGEFFNFVLTQEGIDVYNAIIGGFVTESGEKIKGLNEYINLYNQKTKQKLPKFKPLYKQVLSDRESLSFYGEGYTSDEEVLEVFRNTLNKNSEIFSSIKKLEKLFKNFDEYSSAGIFVKNGPAISTISKDIFGEWNVIRDKWNAEYDDIHLKKKAVVTEKYEDDRRKSFKKIGSFSLEQLQEYADADLSVVEKLKEIIIQKVDEIYKVYGSSEKLFDADFVLEKSLKKNDAVVAIMKDLLDSVKSFENYIKAFFGEGKETNRDESFYGDFVLAYDILLKVDHIYDAIRNYVTQKPYSKDKFKLYFQNPQFMGGWDKDKETDYRATILRYGSKYYLAIMDKKYAKCLQKIDKDDVNGNYEKINYKLLPGPNKMLPKVFFSKKWMAYYNPSEDIQKIYKNGTFKKGDMFNLNDCHKLIDFFKDSISRYPKWSNAYDFNFSETEKYKDIAGFYREVEEQGYKVSFESASKKEVDKLVEEGKLYMFQIYNKDFSDKSHGTPNLHTMYFKLLFDENNHGQIRLSGGAELFMRRASLKKEELVVHPANSPIANKNPDNPKKTTTLSYDVYKDKRFSEDQYLLHIPIAINKCPKNIFKINTEVRVLLKHDDNPYVIGIDRGERNLLYIVVVDGKGNIVEQYSLNEIINNFNGIRIKTDYHSLLDKKEKERFEARQNWTSIENIKELKAGYISQVVHKICELVEKYDAVIALEDLNSGFKNSRVKVEKQVYQKFEKMLIDKLNYMVDKKSNPCATGGALKGYQITNKFESFKSMSTQNGFIFYIPAWLTSKIDPSTGFVNLLKTKYTSIADSKKFISSFDRIMYVPEEDLFEFALDYKNFSRTDADYIKKWKLYSYGNRIRIFRNPKKNNVFDWEEVCLTSAYKELFNKYGINYQQGDIRALLCEQSDKAFYSSFMALMSLMLQMRNSITGRTDVDFLISPVKNSDGIFYDSRNYEAQENAILPKNADANGAYNIARKVLWAIGQFKKAEDEKLDKVKIAISNKEWLEYAQTSVKHXPXPXPXPXPXPXPXPMVSKGEELFTGVVPILVELDGDVNGHKFSVSGEGEGDATYGKLTLKFICTTGKLPVPWPTLVTTLTYGVQCFSRYPDHMKQHDFFKSAMPEGYVQERTIFFKDDGNYKTRAEVKFEGDTLVNRIELKGIDFKEDGNILGHKLEYNYNSHNVYIMADKQKNGIKVNFKIRHNIEDGSVQLADHYQQNTPIGDGPVLLPDNHYLSTQSALSKDPNEKRDHMVLLEFVTAAGITLGMDELYK

SEQ ID NO: 269 - protein, 1485 aa, synthetic construct
  REGION 1..1485: note = SYNTHETIC
  VARIANT 1229: note = X can be any naturally occurring amino acid
  VARIANT 1231: note = X can be any naturally occurring amino acid
  VARIANT 1233: note = X can be any naturally occurring amino acid
  VARIANT 1235: note = X can be any naturally occurring amino acid
  VARIANT 1237: note = X can be any naturally occurring amino acid
  VARIANT 1239: note = X can be any naturally occurring amino acid
  VARIANT 1241: note = X can be any naturally occurring amino acid
  VARIANT 1243: note = X can be any naturally occurring amino acid
  VARIANT 1245: note = X can be any naturally occurring amino acid
MSKLEKFTNCYSLSKTLRFKAIPVGKTQENIDNKRLLVEDEKRAEDYKGVKKLLDRYYLSFINDVLHSIKLKNLNNYISLFRKKTRTEKENKELENLEINLRKEIAKAFKGNEGYKSLFKKDIIETILPEFLDDKDEIALVNSFNGFTTAFTGFFDNRENMFSEEAKSTSIAFRCINENLTRYISNMDIFEKVDAIFDKHEVQEIKEKILNSDYDVEDFFEGEFFNFVLTQEGIDVYNAIIGGFVTESGEKIKGLNEYINLYNQKTKQKLPKFKPLYKQVLSDRESLSFYGEGYTSDEEVLEVFRNTLNKNSEIFSSIKKLEKLFKNFDEYSSAGIFVKNGPAISTISKDIFGEWNVIRDKWNAEYDDIHLKKKAVVTEKYEDDRRKSFKKIGSFSLEQLQEYADADLSVVEKLKEIIIQKVDEIYKVYGSSEKLFDADFVLEKSLKKNDAVVAIMKDLLDSVKSFENYIKAFFGEGKETNRDESFYGDFVLAYDILLKVDHIYDAIRNYVTQKPYSKDKFKLYFQNPQFMGGWDKDKETDYRATILRYGSKYYLAIMDKKYAKCLQKIDKDDVNGNYEKINYKLLPGPNKMLPKVFFSKKWMAYYNPSEDIQKIYKNGTFKKGDMFNLNDCHKLIDFFKDSISRYPKWSNAYDFNFSETEKYKDIAGFYREVEEQGYKVSFESASKKEVDKLVEEGKLYMFQIYNKDFSDKSHGTPNLHTMYFKLLFDENNHGQIRLSGGAELFMRRASLKKEELVVHPANSPIANKNPDNPKKTTTLSYDVYKDKRFSEDQYLLHIPIAINKCPKNIFKINTEVRVLLKHDDNPYVIGIDRGERNLLYIVVVDGKGNIVEQYSLNEIINNFNGIRIKTDYHSLLDKKEKERFEARQNWTSIENIKELKAGYISQVVHKICELVEKYDAVIALEDLNSGFKNSRVKVEKQVYQKFEKMLIDKLNYMVDKKSNPCATGGALKGYQITNKFESFKSMSTQNGFIFYIPAWLTSKIDPSTGFVNLLKTKYTSIADSKKFISSFDRIMYVPEEDLFEFALDYKNFSRTDADYIKKWKLYSYGNRIRIFRNPKKNNVFDWEEVCLTSAYKELFNKYGINYQQGDIRALLCEQSDKAFYSSFMALMSLMLQMRNSITGRTDVDFLISPVKNSDGIFYDSRNYEAQENAILPKNADANGAYNIARKVLWAIGQFKKAEDEKLDKVKIAISNKEWLEYAQTSVKHXPXPXPXPXPXPXPXPXPMVSKGEELFTGVVPILVELDGDVNGHKFSVSGEGEGDATYGKLTLKFICTTGKLPVPWPTLVTTLTYGVQCFSRYPDHMKQHDFFKSAMPEGYVQERTIFFKDDGNYKTRAEVKFEGDTLVNRIELKGIDFKEDGNILGHKLEYNYNSHNVYIMADKQKNGIKVNFKIRHNIEDGSVQLADHYQQNTPIGDGPVLLPDNHYLSTQSALSKDPNEKRDHMVLLEFVTAAGITLGMDELYK

SEQ ID NO: 270 - protein, 1487 aa, synthetic construct
  REGION 1..1487: note = SYNTHETIC
  VARIANT 1229: note = X can be any naturally occurring amino acid
  VARIANT 1231: note = X can be any naturally occurring amino acid
  VARIANT 1233: note = X can be any naturally occurring amino acid
  VARIANT 1235: note = X can be any naturally occurring amino acid
  VARIANT 1237: note = X can be any naturally occurring amino acid
  VARIANT 1239: note = X can be any naturally occurring amino acid
  VARIANT 1241: note = X can be any naturally occurring amino acid
  VARIANT 1243: note = X can be any naturally occurring amino acid
  VARIANT 1245: note = X can be any naturally occurring amino acid
  VARIANT 1247: note = X can be any naturally occurring amino acid
MSKLEKFTNCYSLSKTLRFKAIPVGKTQENIDNKRLLVEDEKRAEDYKGVKKLLDRYYLSFINDVLHSIKLKNLNNYISLFRKKTRTEKENKELENLEINLRKEIAKAFKGNEGYKSLFKKDIIETILPEFLDDKDEIALVNSFNGFTTAFTGFFDNRENMFSEEAKSTSIAFRCINENLTRYISNMDIFEKVDAIFDKHEVQEIKEKILNSDYDVEDFFEGEFFNFVLTQEGIDVYNAIIGGFVTESGEKIKGLNEYINLYNQKTKQKLPKFKPLYKQVLSDRESLSFYGEGYTSDEEVLEVFRNTLNKNSEIFSSIKKLEKLFKNFDEYSSAGIFVKNGPAISTISKDIFGEWNVIRDKWNAEYDDIHLKKKAVVTEKYEDDRRKSFKKIGSFSLEQLQEYADADLSVVEKLKEIIIQKVDEIYKVYGSSEKLFDADFVLEKSLKKNDAVVAIMKDLLDSVKSFENYIKAFFGEGKETNRDESFYGDFVLAYDILLKVDHIYDAIRNYVTQKPYSKDKFKLYFQNPQFMGGWDKDKETDYRATILRYGSKYYLAIMDKKYAKCLQKIDKDDVNGNYEKINYKLLPGPNKMLPKVFFSKKWMAYYNPSEDIQKIYKNGTFKKGDMFNLNDCHKLIDFFKDSISRYPKWSNAYDFNFSETEKYKDIAGFYREVEEQGYKVSFESASKKEVDKLVEEGKLYMFQIYNKDFSDKSHGTPNLHTMYFKLLFDENNHGQIRLSGGAELFMRRASLKKEELVVHPANSPIANKNPDNPKKTTTLSYDVYKDKRFSEDQYLLHIPIAINKCPKNIFKINTEVRVLLKHDDNPYVIGIDRGERNLLYIVVVDGKGNIVEQYSLNEIINNFNGIRIKTDYHSLLDKKEKERFEARQNWTSIENIKELKAGYISQVVHKICELVEKYDAVIALEDLNSGFKNSRVKVEKQVYQKFEKMLIDKLNYMVDKKSNPCATGGALKGYQITNKFESFKSMSTQNGFIFYIPAWLTSKIDPSTGFVNLLKTKYTSIADSKKFISSFDRIMYVPEEDLFEFALDYKNFSRTDADYIKKWKLYSYGNRIRIFRNPKKNNVFDWEEVCLTSAYKELFNKYGINYQQGDIRALLCEQSDKAFYSSFMALMSLMLQMRNSITGRTDVDFLISPVKNSDGIFYDSRNYEAQENAILPKNADANGAYNIARKVLWAIGQFKKAEDEKLDKVKIAISNKEWLEYAQTSVKHXPXPXPXPXPXPXPXPXPXPMVSKGEELFTGVVPILVELDGDVNGHKFSVSGEGEGDATYGKLTLKFICTTGKLPVPWPTLVTTLTYGVQCFSRYPDHMKQHDFFKSAMPEGYVQERTIFFKDDGNYKTRAEVKFEGDTLVNRIELKGIDFKEDGNILGHKLEYNYNSHNVYIMADKQKNGIKVNFKIRHNIEDGSVQLADHYQQNTPIGDGPVLLPDNHYLSTQSALSKDPNEKRDHMVLLEFVTAAGITLGMDELYK

SEQ ID NO: 271 - protein, 1489 aa, synthetic construct
  REGION 1..1489: note = SYNTHETIC
  VARIANT 1229: note = X can be any naturally occurring amino acid
  VARIANT 1231: note = X can be any naturally occurring amino acid
  VARIANT 1233: note = X can be any naturally occurring amino acid
  VARIANT 1235: note = X can be any naturally occurring amino acid
  VARIANT 1237: note = X can be any naturally occurring amino acid
  VARIANT 1239: note = X can be any naturally occurring amino acid
  VARIANT 1241: note = X can be any naturally occurring amino acid
  VARIANT 1243: note = X can be any naturally occurring amino acid
  VARIANT 1245: note = X can be any naturally occurring amino acid
  VARIANT 1247: note = X can be any naturally occurring amino acid
  VARIANT 1249: note = X can be any naturally occurring amino acid
MSKLEKFTNCYSLSKTLRFKAIPVGKTQENIDNKRLLVEDEKRAEDYKGVKKLLDRYYLSFINDVLHSIKLKNLNNYISLFRKKTRTEKENKELENLEINLRKEIAKAFKGNEGYKSLFKKDIIETILPEFLDDKDEIALVNSFNGFTTAFTGFFDNRENMFSEEAKSTSIAFRCINENLTRYISNMDIFEKVDAIFDKHEVQEIKEKILNSDYDVEDFFEGEFFNFVLTQEGIDVYNAIIGGFVTESGEKIKGLNEYINLYNQKTKQKLPKFKPLYKQVLSDRESLSFYGEGYTSDEEVLEVFRNTLNKNSEIFSSIKKLEKLFKNFDEYSSAGIFVKNGPAISTISKDIFGEWNVIRDKWNAEYDDIHLKKKAVVTEKYEDDRRKSFKKIGSFSLEQLQEYADADLSVVEKLKEIIIQKVDEIYKVYGSSEKLFDADFVLEKSLKKNDAVVAIMKDLLDSVKSFENYIKAFFGEGKETNRDESFYGDFVLAYDILLKVDHIYDAIRNYVTQKPYSKDKFKLYFQNPQFMGGWDKDKETDYRATILRYGSKYYLAIMDKKYAKCLQKIDKDDVNGNYEKINYKLLPGPNKMLPKVFFSKKWMAYYNPSEDIQKIYKNGTFKKGDMFNLNDCHKLIDFFKDSISRYPKWSNAYDFNFSETEKYKDIAGFYREVEEQGYKVSFESASKKEVDKLVEEGKLYMFQIYNKDFSDKSHGTPNLHTMYFKLLFDENNHGQIRLSGGAELFMRRASLKKEELVVHPANSPIANKNPDNPKKTTTLSYDVYKDKRFSEDQYLLHIPIAINKCPKNIFKINTEVRVLLKHDDNPYVIGIDRGERNLLYIVVVDGKGNIVEQYSLNEIINNFNGIRIKTDYHSLLDKKEKERFEARQNWTSIENIKELKAGYISQVVHKICELVEKYDAVIALEDLNSGFKNSRVKVEKQVYQKFEKMLIDKLNYMVDKKSNPCATGGALKGYQITNKFESFKSMSTQNGFIFYIPAWLTSKIDPSTGFVNLLKTKYTSIADSKKFISSFDRIMYVPEEDLFEFALDYKNFSRTDADYIKKWKLYSYGNRIRIFRNPKKNNVFDWEEVCLTSAYKELFNKYGINYQQGDIRALLCEQSDKAFYSSFMALMSLMLQMRNSITGRTDVDFLISPVKNSDGIFYDSRNYEAQENAILPKNADANGAYNIARKVLWAIGQFKKAEDEKLDKVKIAISNKEWLEYAQTSVKHXPXPXPXPXPXPXPXPXPXPXPMVSKGEELFTGVVPILVELDGDVNGHKFSVSGEGEGDATYGKLTLKFICTTGKLPVPWPTLVTTLTYGVQCFSRYPDHMKQHDFFKSAMPEGYVQERTIFFKDDGNYKTRAEVKFEGDTLVNRIELKGIDFKEDGNILGHKLEYNYNSHNVYIMADKQKNGIKVNFKIRHNIEDGSVQLADHYQQNTPIGDGPVLLPDNHYLSTQSALSKDPNEKRDHMVLLEFVTAAGITLGMDELYK

SEQ ID NO: 272 - protein, 1491 aa, synthetic construct
  REGION 1..1491: note = SYNTHETIC
  VARIANT 1229: note = X can be any naturally occurring amino acid
  VARIANT 1231: note = X can be any naturally occurring amino acid
  VARIANT 1233: note = X can be any naturally occurring amino acid
  VARIANT 1235: note = X can be any naturally occurring amino acid
  VARIANT 1237: note = X can be any naturally occurring amino acid
  VARIANT 1239: note = X can be any naturally occurring amino acid
  VARIANT 1241: note = X can be any naturally occurring amino acid
  VARIANT 1243: note = X can be any naturally occurring amino acid
  VARIANT 1245: note = X can be any naturally occurring amino acid
  VARIANT 1247: note = X can be any naturally occurring amino acid
  VARIANT 1249: note = X can be any naturally occurring amino acid
  VARIANT 1251: note = X can be any naturally occurring amino acid
MSKLEKFTNCYSLSKTLRFKAIPVGKTQENIDNKRLLVEDEKRAEDYKGVKKLLDRYYLSFINDVLHSIKLKNLNNYISLFRKKTRTEKENKELENLEINLRKEIAKAFKGNEGYKSLFKKDIIETILPEFLDDKDEIALVNSFNGFTTAFTGFFDNRENMFSEEAKSTSIAFRCINENLTRYISNMDIFEKVDAIFDKHEVQEIKEKILNSDYDVEDFFEGEFFNFVLTQEGIDVYNAIIGGFVTESGEKIKGLNEYINLYNQKTKQKLPKFKPLYKQVLSDRESLSFYGEGYTSDEEVLEVFRNTLNKNSEIFSSIKKLEKLFKNFDEYSSAGIFVKNGPAISTISKDIFGEWNVIRDKWNAEYDDIHLKKKAVVTEKYEDDRRKSFKKIGSFSLEQLQEYADADLSVVEKLKEIIIQKVDEIYKVYGSSEKLFDADFVLEKSLKKNDAVVAIMKDLLDSVKSFENYIKAFFGEGKETNRDESFYGDFVLAYDILLKVDHIYDAIRNYVTQKPYSKDKFKLYFQNPQFMGGWDKDKETDYRATILRYGSKYYLAIMDKKYAKCLQKIDKDDVNGNYEKINYKLLPGPNKMLPKVFFSKKWMAYYNPSEDIQKIYKNGTFKKGDMFNLNDCHKLIDFFKDSISRYPKWSNAYDFNFSETEKYKDIAGFYREVEEQGYKVSFESASKKEVDKLVEEGKLYMFQIYNKDFSDKSHGTPNLHTMYFKLLFDENNHGQIRLSGGAELFMRRASLKKEELVVHPANSPIANKNPDNPKKTTTLSYDVYKDKRFSEDQYLLHIPIAINKCPKNIFKINTEVRVLLKHDDNPYVIGIDRGERNLLYIVVVDGKGNIVEQYSLNEIINNFNGIRIKTDYHSLLDKKEKERFEARQNWTSIENIKELKAGYISQVVHKICELVEKYDAVIALEDLNSGFKNSRVKVEKQVYQKFEKMLIDKLNYMVDKKSNPCATGGALKGYQITNKFESFKSMSTQNGFIFYIPAWLTSKIDPSTGFVNLLKTKYTSIADSKKFISSFDRIMYVPEEDLFEFALDYKNFSRTDADYIKKWKLYSYGNRIRIFRNPKKNNVFDWEEVCLTSAYKELFNKYGINYQQGDIRALLCEQSDKAFYSSFMALMSLMLQMRNSITGRTDVDFLISPVKNSDGIFYDSRNYEAQENAILPKNADANGAYNIARKVLWAIGQFKKAEDEKLDKVKIAISNKEWLEYAQTSVKHXPXPXPXPXPXPXPXPXPXPXPXPMVSKGEELFTGVVPILVELDGDVNGHKFSVSGEGEGDATYGKLTLKFICTTGKLPVPWPTLVTTLTYGVQCFSRYPDHMKQHDFFKSAMPEGYVQERTIFFKDDGNYKTRAEVKFEGDTLVNRIELKGIDFKEDGNILGHKLEYNYNSHNVYIMADKQKNGIKVNFKIRHNIEDGSVQLADHYQQNTPIGDGPVLLPDNHYLSTQSALSKDPNEKRDHMVLLEFVTAAGITLGMDELYK

SEQ ID NO: 273 - protein, 1493 aa, synthetic construct
  REGION 1..1493: note = SYNTHETIC
  VARIANT 1229: note = X can be any naturally occurring amino acid
  VARIANT 1231: note = X can be any naturally occurring amino acid
  VARIANT 1233: note = X can be any naturally occurring amino acid
  VARIANT 1235: note = X can be any naturally occurring amino acid
  VARIANT 1237: note = X can be any naturally occurring amino acid
  VARIANT 1239: note = X can be any naturally occurring amino acid
  VARIANT 1241: note = X can be any naturally occurring amino acid
  VARIANT 1243: note = X can be any naturally occurring amino acid
  VARIANT 1245: note = X can be any naturally occurring amino acid
  VARIANT 1247: note = X can be any naturally occurring amino acid
  VARIANT 1249: note = X can be any naturally occurring amino acid
  VARIANT 1251: note = X can be any naturally occurring amino acid
  VARIANT 1253: note = X can be any naturally occurring amino acid
MSKLEKFTNCYSLSKTLRFKAIPVGKTQENIDNKRLLVEDEKRAEDYKGVKKLLDRYYLSFINDVLHSIKLKNLNNYISLFRKKTRTEKENKELENLEINLRKEIAKAFKGNEGYKSLFKKDIIETILPEFLDDKDEIALVNSFNGFTTAFTGFFDNRENMFSEEAKSTSIAFRCINENLTRYISNMDIFEKVDAIFDKHEVQEIKEKILNSDYDVEDFFEGEFFNFVLTQEGIDVYNAIIGGFVTESGEKIKGLNEYINLYNQKTKQKLPKFKPLYKQVLSDRESLSFYGEGYTSDEEVLEVFRNTLNKNSEIFSSIKKLEKLFKNFDEYSSAGIFVKNGPAISTISKDIFGEWNVIRDKWNAEYDDIHLKKKAVVTEKYEDDRRKSFKKIGSFSLEQLQEYADADLSVVEKLKEIIIQKVDEIYKVYGSSEKLFDADFVLEKSLKKNDAVVAIMKDLLDSVKSFENYIKAFFGEGKETNRDESFYGDFVLAYDILLKVDHIYDAIRNYVTQKPYSKDKFKLYFQNPQFMGGWDKDKETDYRATILRYGSKYYLAIMDKKYAKCLQKIDKDDVNGNYEKINYKLLPGPNKMLPKVFFSKKWMAYYNPSEDIQKIYKNGTFKKGDMFNLNDCHKLIDFFKDSISRYPKWSNAYDFNFSETEKYKDIAGFYREVEEQGYKVSFESASKKEVDKLVEEGKLYMFQIYNKDFSDKSHGTPNLHTMYFKLLFDENNHGQIRLSGGAELFMRRASLKKEELVVHPANSPIANKNPDNPKKTTTLSYDVYKDKRFSEDQYLLHIPIAINKCPKNIFKINTEVRVLLKHDDNPYVIGIDRGERNLLYIVVVDGKGNIVEQYSLNEIINNFNGIRIKTDYHSLLDKKEKERFEARQNWTSIENIKELKAGYISQVVHKICELVEKYDAVIALEDLNSGFKNSRVKVEKQVYQKFEKMLIDKLNYMVDKKSNPCATGGALKGYQITNKFESFKSMSTQNGFIFYIPAWLTSKIDPSTGFVNLLKTKYTSIADSKKFISSFDRIMYVPEEDLFEFALDYKNFSRTDADYIKKWKLYSYGNRIRIFRNPKKNNVFDWEEVCLTSAYKELFNKYGINYQQGDIRALLCEQSDKAFYSSFMALMSLMLQMRNSITGRTDVDFLISPVKNSDGIFYDSRNYEAQENAILPKNADANGAYNIARKVLWAIGQFKKAEDEKLDKVKIAISNKEWLEYAQTSVKHXPXPXPXPXPXPXPXPXPXPXPXPXPMVSKGEELFTGVVPILVELDGDVNGHKFSVSGEGEGDATYGKLTLKFICTTGKLPVPWPTLVTTLTYGVQCFSRYPDHMKQHDFFKSAMPEGYVQERTIFFKDDGNYKTRAEVKFEGDTLVNRIELKGIDFKEDGNILGHKLEYNYNSHNVYIMADKQKNGIKVNFKIRHNIEDGSVQLADHYQQNTPIGDGPVLLPDNHYLSTQSALSKDPNEKRDHMVLLEFVTAAGITLGMDELYK

SEQ ID NO: 274 - protein, 1495 aa, synthetic construct
  REGION 1..1495: note = SYNTHETIC
  VARIANT 1229: note = X can be any naturally occurring amino acid
  VARIANT 1231: note = X can be any naturally occurring amino acid
  VARIANT 1233: note = X can be any naturally occurring amino acid
  VARIANT 1235: note = X can be any naturally occurring amino acid
  VARIANT 1237: note = X can be any naturally occurring amino acid
  VARIANT 1239: note = X can be any naturally occurring amino acid
  VARIANT 1241: note = X can be any naturally occurring amino acid
  VARIANT 1243: note = X can be any naturally occurring amino acid
  VARIANT 1245: note = X can be any naturally occurring amino acid
  VARIANT 1247: note = X can be any naturally occurring amino acid
  VARIANT 1249: note = X can be any naturally occurring amino acid
  VARIANT 1251: note = X can be any naturally occurring amino acid
  VARIANT 1253: note = X can be any naturally occurring amino acid
  VARIANT 1255: note = X can be any naturally occurring amino acid
MSKLEKFTNCYSLSKTLRFKAIPVGKTQENIDNKRLLVEDEKRAEDYKGVKKLLDRYYLSFINDVLHSIKLKNLNNYISLFRKKTRTEKENKELENLEINLRKEIAKAFKGNEGYKSLFKKDIIETILPEFLDDKDEIALVNSFNGFTTAFTGFFDNRENMFSEEAKSTSIAFRCINENLTRYISNMDIFEKVDAIFDKHEVQEIKEKILNSDYDVEDFFEGEFFNFVLTQEGIDVYNAIIGGFVTESGEKIKGLNEYINLYNQKTKQKLPKFKPLYKQVLSDRESLSFYGEGYTSDEEVLEVFRNTLNKNSEIFSSIKKLEKLFKNFDEYSSAGIFVKNGPAISTISKDIFGEWNVIRDKWNAEYDDIHLKKKAVVTEKYEDDRRKSFKKIGSFSLEQLQEYADADLSVVEKLKEIIIQKVDEIYKVYGSSEKLFDADFVLEKSLKKNDAVVAIMKDLLDSVKSFENYIKAFFGEGKETNRDESFYGDFVLAYDILLKVDHIYDAIRNYVTQKPYSKDKFKLYFQNPQFMGGWDKDKETDYRATILRYGSKYYLAIMDKKYAKCLQKIDKDDVNGNYEKINYKLLPGPNKMLPKVFFSKKWMAYYNPSEDIQKIYKNGTFKKGDMFNLNDCHKLIDFFKDSISRYPKWSNAYDFNFSETEKYKDIAGFYREVEEQGYKVSFESASKKEVDKLVEEGKLYMFQIYNKDFSDKSHGTPNLHTMYFKLLFDENNHGQIRLSGGAELFMRRASLKKEELVVHPANSPIANKNPDNPKKTTTLSYDVYKDKRFSEDQYLLHIPIAINKCPKNIFKINTEVRVLLKHDDNPYVIGIDRGERNLLYIVVVDGKGNIVEQYSLNEIINNFNGIRIKTDYHSLLDKKEKERFEARQNWTSIENIKELKAGYISQVVHKICELVEKYDAVIALEDLNSGFKNSRVKVEKQVYQKFEKMLIDKLNYMVDKKSNPCATGGALKGYQITNKFESFKSMSTQNGFIFYIPAWLTSKIDPSTGFVNLLKTKYTSIADSKKFISSFDRIMYVPEEDLFEFALDYKNFSRTDADYIKKWKLYSYGNRIRIFRNPKKNNVFDWEEVCLTSAYKELFNKYGINYQQGDIRALLCEQSDKAFYSSFMALMSLMLQMRNSITGRTDVDFLISPVKNSDGIFYDSRNYEAQENAILPKNADANGAYNIARKVLWAIGQFKKAEDEKLDKVKIAISNKEWLEYAQTSVKHXPXPXPXPXPXPXPXPXPXPXPXPXPXPMVSKGEELFTGVVPILVELDGDVNGHKFSVSGEGEGDATYGKLTLKFICTTGKLPVPWPTLVTTLTYGVQCFSRYPDHMKQHDFFKSAMPEGYVQERTIFFKDDGNYKTRAEVKFEGDTLVNRIELKGIDFKEDGNILGHKLEYNYNSHNVYIMADKQKNGIKVNFKIRHNIEDGSVQLADHYQQNTPIGDGPVLLPDNHYLSTQSALSKDPNEKRDHMVLLEFVTAAGITLGMDELYK

SEQ ID NO: 275 - protein, 1482 aa, synthetic construct
  REGION 1..1482: note = SYNTHETIC
MSKLEKFTNCYSLSKTLRFKAIPVGKTQENIDNKRLLVEDEKRAEDYKGVKKLLDRYYLSFINDVLHSIKLKNLNNYISLFRKKTRTEKENKELENLEINLRKEIAKAFKGNEGYKSLFKKDIIETILPEFLDDKDEIALVNSFNGFTTAFTGFFDNRENMFSEEAKSTSIAFRCINENLTRYISNMDIFEKVDAIFDKHEVQEIKEKILNSDYDVEDFFEGEFFNFVLTQEGIDVYNAIIGGFVTESGEKIKGLNEYINLYNQKTKQKLPKFKPLYKQVLSDRESLSFYGEGYTSDEEVLEVFRNTLNKNSEIFSSIKKLEKLFKNFDEYSSAGIFVKNGPAISTISKDIFGEWNVIRDKWNAEYDDIHLKKKAVVTEKYEDDRRKSFKKIGSFSLEQLQEYADADLSVVEKLKEIIIQKVDEIYKVYGSSEKLFDADFVLEKSLKKNDAVVAIMKDLLDSVKSFENYIKAFFGEGKETNRDESFYGDFVLAYDILLKVDHIYDAIRNYVTQKPYSKDKFKLYFQNPQFMGGWDKDKETDYRATILRYGSKYYLAIMDKKYAKCLQKIDKDDVNGNYEKINYKLLPGPNKMLPKVFFSKKWMAYYNPSEDIQKIYKNGTFKKGDMFNLNDCHKLIDFFKDSISRYPKWSNAYDFNFSETEKYKDIAGFYREVEEQGYKVSFESASKKEVDKLVEEGKLYMFQIYNKDFSDKSHGTPNLHTMYFKLLFDENNHGQIRLSGGAELFMRRASLKKEELVVHPANSPIANKNPDNPKKTTTLSYDVYKDKRFSEDQYLLHIPIAINKCPKNIFKINTEVRVLLKHDDNPYVIGIDRGERNLLYIVVVDGKGNIVEQYSLNEIINNFNGIRIKTDYHSLLDKKEKERFEARQNWTSIENIKELKAGYISQVVHKICELVEKYDAVIALEDLNSGFKNSRVKVEKQVYQKFEKMLIDKLNYMVDKKSNPCATGGALKGYQITNKFESFKSMSTQNGFIFYIPAWLTSKIDPSTGFVNLLKTKYTSIADSKKFISSFDRIMYVPEEDLFEFALDYKNFSRTDADYIKKWKLYSYGNRIRIFRNPKKNNVFDWEEVCLTSAYKELFNKYGINYQQGDIRALLCEQSDKAFYSSFMALMSLMLQMRNSITGRTDVDFLISPVKNSDGIFYDSRNYEAQENAILPKNADANGAYNIARKVLWAIGQFKKAEDEKLDKVKIAISNKEWLEYAQTSVKHGGGGSEAAAKGGGGSMVSKGEELFTGVVPILVELDGDVNGHKFSVSGEGEGDATYGKLTLKFICTTGKLPVPWPTLVTTLTYGVQCFSRYPDHMKQHDFFKSAMPEGYVQERTIFFKDDGNYKTRAEVKFEGDTLVNRIELKGIDFKEDGNILGHKLEYNYNSHNVYIMADKQKNGIKVNFKIRHNIEDGSVQLADHYQQNTPIGDGPVLLPDNHYLSTQSALSKDPNEKRDHMVLLEFVTAAGITLGMDELYK

SEQ ID NO: 276 - protein, 1476 aa, synthetic construct
  REGION 1..1476: note = SYNTHETIC
MSKLEKFTNCYSLSKTLRFKAIPVGKTQENIDNKRLLVEDEKRAEDYKGVKKLLDRYYLSFINDVLHSIKLKNLNNYISLFRKKTRTEKENKELENLEINLRKEIAKAFKGNEGYKSLFKKDIIETILPEFLDDKDEIALVNSFNGFTTAFTGFFDNRENMFSEEAKSTSIAFRCINENLTRYISNMDIFEKVDAIFDKHEVQEIKEKILNSDYDVEDFFEGEFFNFVLTQEGIDVYNAIIGGFVTESGEKIKGLNEYINLYNQKTKQKLPKFKPLYKQVLSDRESLSFYGEGYTSDEEVLEVFRNTLNKNSEIFSSIKKLEKLFKNFDEYSSAGIFVKNGPAISTISKDIFGEWNVIRDKWNAEYDDIHLKKKAVVTEKYEDDRRKSFKKIGSFSLEQLQEYADADLSVVEKLKEIIIQKVDEIYKVYGSSEKLFDADFVLEKSLKKNDAVVAIMKDLLDSVKSFENYIKAFFGEGKETNRDESFYGDFVLAYDILLKVDHIYDAIRNYVTQKPYSKDKFKLYFQNPQFMGGWDKDKETDYRATILRYGSKYYLAIMDKKYAKCLQKIDKDDVNGNYEKINYKLLPGPNKMLPKVFFSKKWMAYYNPSEDIQKIYKNGTFKKGDMFNLNDCHKLIDFFKDSISRYPKWSNAYDFNFSETEKYKDIAGFYREVEEQGYKVSFESASKKEVDKLVEEGKLYMFQIYNKDFSDKSHGTPNLHTMYFKLLFDENNHGQIRLSGGAELFMRRASLKKEELVVHPANSPIANKNPDNPKKTTTLSYDVYKDKRFSEDQYLLHIPIAINKCPKNIFKINTEVRVLLKHDDNPYVIGIDRGERNLLYIVVVDGKGNIVEQYSLNEIINNFNGIRIKTDYHSLLDKKEKERFEARQNWTSIENIKELKAGYISQVVHKICELVEKYDAVIALEDLNSGFKNSRVKVEKQVYQKFEKMLIDKLNYMVDKKSNPCATGGALKGYQITNKFESFKSMSTQNGFIFYIPAWLTSKIDPSTGFVNLLKTKYTSIADSKKFISSFDRIMYVPEEDLFEFALDYKNFSRTDADYIKKWKLYSYGNRIRIFRNPKKNNVFDWEEVCLTSAYKELFNKYGINYQQGDIRALLCEQSDKAFYSSFMALMSLMLQMRNSITGRTDVDFLISPVKNSDGIFYDSRNYEAQENAILPKNADANGAYNIARKVLWAIGQFKKAEDEKLDKVKIAISNKEWLEYAQTSVKHGSAGSAAGSGEFMVSKGEEDNMAIIKEFMRFKVHMEGSVNGHEFEIEGEGEGRPYEGTQTAKLKVTKGGPLPFAWDILSPQFMYGSKAYVKHPADIPDYLKLSFPEGFKWERVMNFEDGGVVTVTQDSSLQDGEFIYKVKLRGTNFPSDGPVMQKKTMGWEASSERMYPEDGALKGEIKQRLKLKDGGHYDAEVKTTYKAKKPVQLPGAYNVNIKLDITSHNEDYTIVEQYERAEGRHSTGGMDELYK

SEQ ID NO: 277 - protein, 1484 aa, synthetic construct
  REGION 1..1484: note = SYNTHETIC
MSKLEKFTNCYSLSKTLRFKAIPVGKTQENIDNKRLLVEDEKRAEDYKGVKKLLDRYYLSFINDVLHSIKLKNLNNYISLFRKKTRTEKENKELENLEINLRKEIAKAFKGNEGYKSLFKKDIIETILPEFLDDKDEIALVNSFNGFTTAFTGFFDNRENMFSEEAKSTSIAFRCINENLTRYISNMDIFEKVDAIFDKHEVQEIKEKILNSDYDVEDFFEGEFFNFVLTQEGIDVYNAIIGGFVTESGEKIKGLNEYINLYNQKTKQKLPKFKPLYKQVLSDRESLSFYGEGYTSDEEVLEVFRNTLNKNSEIFSSIKKLEKLFKNFDEYSSAGIFVKNGPAISTISKDIFGEWNVIRDKWNAEYDDIHLKKKAVVTEKYEDDRRKSFKKIGSFSLEQLQEYADADLSVVEKLKEIIIQKVDEIYKVYGSSEKLFDADFVLEKSLKKNDAVVAIMKDLLDSVKSFENYIKAFFGEGKETNRDESFYGDFVLAYDILLKVDHIYDAIRNYVTQKPYSKDKFKLYFQNPQFMGGWDKDKETDYRATILRYGSKYYLAIMDKKYAKCLQKIDKDDVNGNYEKINYKLLPGPNKMLPKVFFSKKWMAYYNPSEDIQKIYKNGTFKKGDMFNLNDCHKLIDFFKDSISRYPKWSNAYDFNFSETEKYKDIAGFYREVEEQGYKVSFESASKKEVDKLVEEGKLYMFQIYNKDFSDKSHGTPNLHTMYFKLLFDENNHGQIRLSGGAELFMRRASLKKEELVVHPANSPIANKNPDNPKKTTTLSYDVYKDKRFSEDQYLLHIPIAINKCPKNIFKINTEVRVLLKHDDNPYVIGIDRGERNLLYIVVVDGKGNIVEQYSLNEIINNFNGIRIKTDYHSLLDKKEKERFEARQNWTSIENIKELKAGYISQVVHKICELVEKYDAVIALEDLNSGFKNSRVKVEKQVYQKFEKMLIDKLNYMVDKKSNPCATGGALKGYQITNKFESFKSMSTQNGFIFYIPAWLTSKIDPSTGFVNLLKTKYTSIADSKKFISSFDRIMYVPEEDLFEFALDYKNFSRTDADYIKKWKLYSYGNRIRIFRNPKKNNVFDWEEVCLTSAYKELFNKYGINYQQGDIRALLCEQSDKAFYSSFMALMSLMLQMRNSITGRTDVDFLISPVKNSDGIFYDSRNYEAQENAILPKNADANGAYNIARKVLWAIGQFKKAEDEKLDKVKIAISNKEWLEYAQTSVKHGGGGSGGGGSGGGGSGGGGSMVSKGEEDNMAIIKEFMRFKVHMEGSVNGHEFEIEGEGEGRPYEGTQTAKLKVTKGGPLPFAWDILSPQFMYGSKAYVKHPADIPDYLKLSFPEGFKWERVMNFEDGGVVTVTQDSSLQDGEFIYKVKLRGTNFPSDGPVMQKKTMGWEASSERMYPEDGALKGEIKQRLKLKDGGHYDAEVKTTYKAKKPVQLPGAYNVNIKLDITSHNEDYTIVEQYERAEGRHSTGGMDELYK

SEQ ID NO: 278 - protein, 1486 aa, synthetic construct
  REGION 1..1486: note = SYNTHETIC
MSKLEKFTNCYSLSKTLRFKAIPVGKTQENIDNKRLLVEDEKRAEDYKGVKKLLDRYYLSFINDVLHSIKLKNLNNYISLFRKKTRTEKENKELENLEINLRKEIAKAFKGNEGYKSLFKKDIIETILPEFLDDKDEIALVNSFNGFTTAFTGFFDNRENMFSEEAKSTSIAFRCINENLTRYISNMDIFEKVDAIFDKHEVQEIKEKILNSDYDVEDFFEGEFFNFVLTQEGIDVYNAIIGGFVTESGEKIKGLNEYINLYNQKTKQKLPKFKPLYKQVLSDRESLSFYGEGYTSDEEVLEVFRNTLNKNSEIFSSIKKLEKLFKNFDEYSSAGIFVKNGPAISTISKDIFGEWNVIRDKWNAEYDDIHLKKKAVVTEKYEDDRRKSFKKIGSFSLEQLQEYADADLSVVEKLKEIIIQKVDEIYKVYGSSEKLFDADFVLEKSLKKNDAVVAIMKDLLDSVKSFENYIKAFFGEGKETNRDESFYGDFVLAYDILLKVDHIYDAIRNYVTQKPYSKDKFKLYFQNPQFMGGWDKDKETDYRATILRYGSKYYLAIMDKKYAKCLQKIDKDDVNGNYEKINYKLLPGPNKMLPKVFFSKKWMAYYNPSEDIQKIYKNGTFKKGDMFNLNDCHKLIDFFKDSISRYPKWSNAYDFNFSETEKYKDIAGFYREVEEQGYKVSFESASKKEVDKLVEEGKLYMFQIYNKDFSDKSHGTPNLHTMYFKLLFDENNHGQIRLSGGAELFMRRASLKKEELVVHPANSPIANKNPDNPKKTTTLSYDVYKDKRFSEDQYLLHIPIAINKCPKNIFKINTEVRVLLKHDDNPYVIGIDRGERNLLYIVVVDGKGNIVEQYSLNEIINNFNGIRIKTDYHSLLDKKEKERFEARQNWTSIENIKELKAGYISQVVHKICELVEKYDAVIALEDLNSGFKNSRVKVEKQVYQKFEKMLIDKLNYMVDKKSNPCATGGALKGYQITNKFESFKSMSTQNGFIFYIPAWLTSKIDPSTGFVNLLKTKYTSIADSKKFISSFDRIMYVPEEDLFEFALDYKNFSRTDADYIKKWKLYSYGNRIRIFRNPKKNNVFDWEEVCLTSAYKELFNKYGINYQQGDIRALLCEQSDKAFYSSFMALMSLMLQMRNSITGRTDVDFLISPVKNSDGIFYDSRNYEAQENAILPKNADANGAYNIARKVLWAIGQFKKAEDEKLDKVKIAISNKEWLEYAQTSVKHAEAAAKEAAAKEAAAKEAAAKAMVSKGEEDNMAIIKEFMRFKVHMEGSVNGHEFEIEGEGEGRPYEGTQTAKLKVTKGGPLPFAWDILSPQFMYGSKAYVKHPADIPDYLKLSFPEGFKWERVMNFEDGGVVTVTQDSSLQDGEFIYKVKLRGTNFPSDGPVMQKKTMGWEASSERMYPEDGALKGEIKQRLKLKDGGHYDAEVKTTYKAKKPVQLPGAYNVNIKLDITSHNEDYTIVEQYERAEGRHSTGGMDELYK

SEQ ID NO: 279 - protein, 1510 aa, synthetic construct
  REGION 1..1510: note = SYNTHETIC
MSKLEKFTNCYSLSKTLRFKAIPVGKTQENIDNKRLLVEDEKRAEDYKGVKKLLDRYYLSFINDVLHSIKLKNLNNYISLFRKKTRTEKENKELENLEINLRKEIAKAFKGNEGYKSLFKKDIIETILPEFLDDKDEIALVNSFNGFTTAFTGFFDNRENMFSEEAKSTSIAFRCINENLTRYISNMDIFEKVDAIFDKHEVQEIKEKILNSDYDVEDFFEGEFFNFVLTQEGIDVYNAIIGGFVTESGEKIKGLNEYINLYNQKTKQKLPKFKPLYKQVLSDRESLSFYGEGYTSDEEVLEVFRNTLNKNSEIFSSIKKLEKLFKNFDEYSSAGIFVKNGPAISTISKDIFGEWNVIRDKWNAEYDDIHLKKKAVVTEKYEDDRRKSFKKIGSFSLEQLQEYADADLSVVEKLKEIIIQKVDEIYKVYGSSEKLFDADFVLEKSLKKNDAVVAIMKDLLDSVKSFENYIKAFFGEGKETNRDESFYGDFVLAYDILLKVDHIYDAIRNYVTQKPYSKDKFKLYFQNPQFMGGWDKDKETDYRATILRYGSKYYLAIMDKKYAKCLQKIDKDDVNGNYEKINYKLLPGPNKMLPKVFFSKKWMAYYNPSEDIQKIYKNGTFKKGDMFNLNDCHKLIDFFKDSISRYPKWSNAYDFNFSETEKYKDIAGFYREVEEQGYKVSFESASKKEVDKLVEEGKLYMFQIYNKDFSDKSHGTPNLHTMYFKLLFDENNHGQIRLSGGAELFMRRASLKKEELVVHPANSPIANKNPDNPKKTTTLSYDVYKDKRFSEDQYLLHIPIAINKCPKNIFKINTEVRVLLKHDDNPYVIGIDRGERNLLYIVVVDGKGNIVEQYSLNEIINNFNGIRIKTDYHSLLDKKEKERFEARQNWTSIENIKELKAGYISQVVHKICELVEKYDAVIALEDLNSGFKNSRVKVEKQVYQKFEKMLIDKLNYMVDKKSNPCATGGALKGYQITNKFESFKSMSTQNGFIFYIPAWLTSKIDPSTGFVNLLKTKYTSIADSKKFISSFDRIMYVPEEDLFEFALDYKNFSRTDADYIKKWKLYSYGNRIRIFRNPKKNNVFDWEEVCLTSAYKELFNKYGINYQQGDIRALLCEQSDKAFYSSFMALMSLMLQMRNSITGRTDVDFLISPVKNSDGIFYDSRNYEAQENAILPKNADANGAYNIARKVLWAIGQFKKAEDEKLDKVKIAISNKEWLEYAQTSVKHAEAAAKEAAAKEAAAKEAAAKALEAEAAAKEAAAKEAAAKEAAAKAMVSKGEEDNMAIIKEFMRFKVHMEGSVNGHEFEIEGEGEGRPYEGTQTAKLKVTKGGPLPFAWDILSPQFMYGSKAYVKHPADIPDYLKLSFPEGFKWERVMNFEDGGVVTVTQDSSLQDGEFIYKVKLRGTNFPSDGPVMQKKTMGWEASSERMYPEDGALKGEIKQRLKLKDGGHYDAEVKTTYKAKKPVQLPGAYNVNIKLDITSHNEDYTIVEQYERAEGRHSTGGMDELYK

SEQ ID NO: 280 - protein, 1514 aa, synthetic construct
  REGION 1..1514: note = SYNTHETIC
MSKLEKFTNCYSLSKTLRFKAIPVGKTQENIDNKRLLVEDEKRAEDYKGVKKLLDRYYLSFINDVLHSIKLKNLNNYISLFRKKTRTEKENKELENLEINLRKEIAKAFKGNEGYKSLFKKDIIETILPEFLDDKDEIALVNSFNGFTTAFTGFFDNRENMFSEEAKSTSIAFRCINENLTRYISNMDIFEKVDAIFDKHEVQEIKEKILNSDYDVEDFFEGEFFNFVLTQEGIDVYNAIIGGFVTESGEKIKGLNEYINLYNQKTKQKLPKFKPLYKQVLSDRESLSFYGEGYTSDEEVLEVFRNTLNKNSEIFSSIKKLEKLFKNFDEYSSAGIFVKNGPAISTISKDIFGEWNVIRDKWNAEYDDIHLKKKAVVTEKYEDDRRKSFKKIGSFSLEQLQEYADADLSVVEKLKEIIIQKVDEIYKVYGSSEKLFDADFVLEKSLKKNDAVVAIMKDLLDSVKSFENYIKAFFGEGKETNRDESFYGDFVLAYDILLKVDHIYDAIRNYVTQKPYSKDKFKLYFQNPQFMGGWDKDKETDYRATILRYGSKYYLAIMDKKYAKCLQKIDKDDVNGNYEKINYKLLPGPNKMLPKVFFSKKWMAYYNPSEDIQKIYKNGTFKKGDMFNLNDCHKLIDFFKDSISRYPKWSNAYDFNFSETEKYKDIAGFYREVEEQGYKVSFESASKKEVDKLVEEGKLYMFQIYNKDFSDKSHGTPNLHTMYFKLLFDENNHGQIRLSGGAELFMRRASLKKEELVVHPANSPIANKNPDNPKKTTTLSYDVYKDKRFSEDQYLLHIPIAINKCPKNIFKINTEVRVLLKHDDNPYVIGIDRGERNLLYIVVVDGKGNIVEQYSLNEIINNFNGIRIKTDYHSLLDKKEKERFEARQNWTSIENIKELKAGYISQVVHKICELVEKYDAVIALEDLNSGFKNSRVKVEKQVYQKFEKMLIDKLNYMVDKKSNPCATGGALKGYQITNKFESFKSMSTQNGFIFYIPAWLTSKIDPSTGFVNLLKTKYTSIADSKKFISSFDRIMYVPEEDLFEFALDYKNFSRTDADYIKKWKLYSYGNRIRIFRNPKKNNVFDWEEVCLTSAYKELFNKYGINYQQGDIRALLCEQSDKAFYSSFMALMSLMLQMRNSITGRTDVDFLISPVKNSDGIFYDSRNYEAQENAILPKNADANGAYNIARKVLWAIGQFKKAEDEKLDKVKIAISNKEWLEYAQTSVKHLEAEAAAKEAAAKEAAAKEAAAKALEAEAAAKEAAAKEAAAKEAAAKALEMVSKGEEDNMAIIKEFMRFKVHMEGSVNGHEFEIEGEGEGRPYEGTQTAKLKVTKGGPLPFAWDILSPQFMYGSKAYVKHPADIPDYLKLSFPEGFKWERVMNFEDGGVVTVTQDSSLQDGEFIYKVKLRGTNFPSDGPVMQKKTMGWEASSERMYPEDGALKGEIKQRLKLKDGGHYDAEVKTTYKAKKPVQLPGAYNVNIKLDITSHNEDYTIVEQYERAEGRHSTGGMDELYK

SEQ ID NO: 281 - protein, 1467 aa, synthetic construct
  REGION 1..1467: note = SYNTHETIC
MSKLEKFTNCYSLSKTLRFKAIPVGKTQENIDNKRLLVEDEKRAEDYKGVKKLLDRYYLSFINDVLHSIKLKNLNNYISLFRKKTRTEKENKELENLEINLRKEIAKAFKGNEGYKSLFKKDIIETILPEFLDDKDEIALVNSFNGFTTAFTGFFDNRENMFSEEAKSTSIAFRCINENLTRYISNMDIFEKVDAIFDKHEVQEIKEKILNSDYDVEDFFEGEFFNFVLTQEGIDVYNAIIGGFVTESGEKIKGLNEYINLYNQKTKQKLPKFKPLYKQVLSDRESLSFYGEGYTSDEEVLEVFRNTLNKNSEIFSSIKKLEKLFKNFDEYSSAGIFVKNGPAISTISKDIFGEWNVIRDKWNAEYDDIHLKKKAVVTEKYEDDRRKSFKKIGSFSLEQLQEYADADLSVVEKLKEIIIQKVDEIYKVYGSSEKLFDADFVLEKSLKKNDAVVAIMKDLLDSVKSFENYIKAFFGEGKETNRDESFYGDFVLAYDILLKVDHIYDAIRNYVTQKPYSKDKFKLYFQNPQFMGGWDKDKETDYRATILRYGSKYYLAIMDKKYAKCLQKIDKDDVNGNYEKINYKLLPGPNKMLPKVFFSKKWMAYYNPSEDIQKIYKNGTFKKGDMFNLNDCHKLIDFFKDSISRYPKWSNAYDFNFSETEKYKDIAGFYREVEEQGYKVSFESASKKEVDKLVEEGKLYMFQIYNKDFSDKSHGTPNLHTMYFKLLFDENNHGQIRLSGGAELFMRRASLKKEELVVHPANSPIANKNPDNPKKTTTLSYDVYKDKRFSEDQYLLHIPIAINKCPKNIFKINTEVRVLLKHDDNPYVIGIDRGERNLLYIVVVDGKGNIVEQYSLNEIINNFNGIRIKTDYHSLLDKKEKERFEARQNWTSIENIKELKAGYISQVVHKICELVEKYDAVIALEDLNSGFKNSRVKVEKQVYQKFEKMLIDKLNYMVDKKSNPCATGGALKGYQITNKFESFKSMSTQNGFIFYIPAWLTSKIDPSTGFVNLLKTKYTSIADSKKFISSFDRIMYVPEEDLFEFALDYKNFSRTDADYIKKWKLYSYGNRIRIFRNPKKNNVFDWEEVCLTSAYKELFNKYGINYQQGDIRALLCEQSDKAFYSSFMALMSLMLQMRNSITGRTDVDFLISPVKNSDGIFYDSRNYEAQENAILPKNADANGAYNIARKVLWAIGQFKKAEDEKLDKVKIAISNKEWLEYAQTSVKHAPAMVSKGEEDNMAIIKEFMRFKVHMEGSVNGHEFEIEGEGEGRPYEGTQTAKLKVTKGGPLPFAWDILSPQFMYGSKAYVKHPADIPDYLKLSFPEGFKWERVMNFEDGGVVTVTQDSSLQDGEFIYKVKLRGTNFPSDGPVMQKKTMGWEASSERMYPEDGALKGEIKQRLKLKDGGHYDAEVKTTYKAKKPVQLPGAYNVNIKLDITSHNEDYTIVEQYERAEGRHSTGGMDELYK

SEQ ID NO: 282 - protein, 1469 aa, synthetic construct
  REGION 1..1469: note = SYNTHETIC
MSKLEKFTNCYSLSKTLRFKAIPVGKTQENIDNKRLLVEDEKRAEDYKGVKKLLDRYYLSFINDVLHSIKLKNLNNYISLFRKKTRTEKENKELENLEINLRKEIAKAFKGNEGYKSLFKKDIIETILPEFLDDKDEIALVNSFNGFTTAFTGFFDNRENMFSEEAKSTSIAFRCINENLTRYISNMDIFEKVDAIFDKHEVQEIKEKILNSDYDVEDFFEGEFFNFVLTQEGIDVYNAIIGGFVTESGEKIKGLNEYINLYNQKTKQKLPKFKPLYKQVLSDRESLSFYGEGYTSDEEVLEVFRNTLNKNSEIFSSIKKLEKLFKNFDEYSSAGIFVKNGPAISTISKDIFGEWNVIRDKWNAEYDDIHLKKKAVVTEKYEDDRRKSFKKIGSFSLEQLQEYADADLSVVEKLKEIIIQKVDEIYKVYGSSEKLFDADFVLEKSLKKNDAVVAIMKDLLDSVKSFENYIKAFFGEGKETNRDESFYGDFVLAYDILLKVDHIYDAIRNYVTQKPYSKDKFKLYFQNPQFMGGWDKDKETDYRATILRYGSKYYLAIMDKKYAKCLQKIDKDDVNGNYEKINYKLLPGPNKMLPKVFFSKKWMAYYNPSEDIQKIYKNGTFKKGDMFNLNDCHKLIDFFKDSISRYPKWSNAYDFNFSETEKYKDIAGFYREVEEQGYKVSFESASKKEVDKLVEEGKLYMFQIYNKDFSDKSHGTPNLHTMYFKLLFDENNHGQIRLSGGAELFMRRASLKKEELVVHPANSPIANKNPDNPKKTTTLSYDVYKDKRFSEDQYLLHIPIAINKCPKNIFKINTEVRVLLKHDDNPYVIGIDRGERNLLYIVVVDGKGNIVEQYSLNEIINNFNGIRIKTDYHSLLDKKEKERFEARQNWTSIENIKELKAGYISQVVHKICELVEKYDAVIALEDLNSGFKNSRVKVEKQVYQKFEKMLIDKLNYMVDKKSNPCATGGALKGYQITNKFESFKSMSTQNGFIFYIPAWLTSKIDPSTGFVNLLKTKYTSIADSKKFISSFDRIMYVPEEDLFEFALDYKNFSRTDADYIKKWKLYSYGNRIRIFRNPKKNNVFDWEEVCLTSAYKELFNKYGINYQQGDIRALLCEQSDKAFYSSFMALMSLMLQMRNSITGRTDVDFLISPVKNSDGIFYDSRNYEAQENAILPKNADANGAYNIARKVLWAIGQFKKAEDEKLDKVKIAISNKEWLEYAQTSVKHAPAPAMVSKGEEDNMAIIKEFMRFKVHMEGSVNGHEFEIEGEGEGRPYEGTQTAKLKVTKGGPLPFAWDILSPQFMYGSKAYVKHPADIPDYLKLSFPEGFKWERVMNFEDGGVVTVTQDSSLQDGEFIYKVKLRGTNFPSDGPVMQKKTMGWEASSERMYPEDGALKGEIKQRLKLKDGGHYDAEVKTTYKAKKPVQLPGAYNVNIKLDITSHNEDYTIVEQYERAEGRHSTGGMDELYK

SEQ ID NO: 283 - protein, 1471 aa, synthetic construct
  REGION 1..1471: note = SYNTHETIC
MSKLEKFTNCYSLSKTLRFKAIPVGKTQENIDNKRLLVEDEKRAEDYKGVKKLLDRYYLSFINDVLHSIKLKNLNNYISLFRKKTRTEKENKELENLEINLRKEIAKAFKGNEGYKSLFKKDIIETILPEFLDDKDEIALVNSFNGFTTAFTGFFDNRENMFSEEAKSTSIAFRCINENLTRYISNMDIFEKVDAIFDKHEVQEIKEKILNSDYDVEDFFEGEFFNFVLTQEGIDVYNAIIGGFVTESGEKIKGLNEYINLYNQKTKQKLPKFKPLYKQVLSDRESLSFYGEGYTSDEEVLEVFRNTLNKNSEIFSSIKKLEKLFKNFDEYSSAGIFVKNGPAISTISKDIFGEWNVIRDKWNAEYDDIHLKKKAVVTEKYEDDRRKSFKKIGSFSLEQLQEYADADLSVVEKLKEIIIQKVDEIYKVYGSSEKLFDADFVLEKSLKKNDAVVAIMKDLLDSVKSFENYIKAFFGEGKETNRDESFYGDFVLAYDILLKVDHIYDAIRNYVTQKPYSKDKFKLYFQNPQFMGGWDKDKETDYRATILRYGSKYYLAIMDKKYAKCLQKIDKDDVNGNYEKINYKLLPGPNKMLPKVFFSKKWMAYYNPSEDIQKIYKNGTFKKGDMFNLNDCHKLIDFFKDSISRYPKWSNAYDFNFSETEKYKDIAGFYREVEEQGYKVSFESASKKEVDKLVEEGKLYMFQIYNKDFSDKSHGTPNLHTMYFKLLFDENNHGQIRLSGGAELFMRRASLKKEELVVHPANSPIANKNPDNPKKTTTLSYDVYKDKRFSEDQYLLHIPIAINKCPKNIFKINTEVRVLLKHDDNPYVIGIDRGERNLLYIVVVDGKGNIVEQYSLNEIINNFNGIRIKTDYHSLLDKKEKERFEARQNWTSIENIKELKAGYISQVVHKICELVEKYDAVIALEDLNSGFKNSRVKVEKQVYQKFEKMLIDKLNYMVDKKSNPCATGGALKGYQITNKFESFKSMSTQNGFIFYIPAWLTSKIDPSTGFVNLLKTKYTSIADSKKFISSFDRIMYVPEEDLFEFALDYKNFSRTDADYIKKWKLYSYGNRIRIFRNPKKNNVFDWEEVCLTSAYKELFNKYGINYQQGDIRALLCEQSDKAFYSSFMALMSLMLQMRNSITGRTDVDFLISPVKNSDGIFYDSRNYEAQENAILPKNADANGAYNIARKVLWAIGQFKKAEDEKLDKVKIAISNKEWLEYAQTSVKHAPAPAPAMVSKGEEDNMAIIKEFMRFKVHMEGSVNGHEFEIEGEGEGRPYEGTQTAKLKVTKGGPLPFAWDILSPQFMYGSKAYVKHPADIPDYLKLSFPEGFKWERVMNFEDGGVVTVTQDSSLQDGEFIYKVKLRGTNFPSDGPVMQKKTMGWEASSERMYPEDGALKGEIKQRLKLKDGGHYDAEVKTTYKAKKPVQLPGAYNVNIKLDITSHNEDYTIVEQYERAEGRHSTGGMDELYK

SEQ ID NO: 284 - protein, 1473 aa, synthetic construct
  REGION 1..1473: note = SYNTHETIC
MSKLEKFTNCYSLSKTLRFKAIPVGKTQENIDNKRLLVEDEKRAEDYKGVKKLLDRYYLSFINDVLHSIKLKNLNNYISLFRKKTRTEKENKELENLEINLRKEIAKAFKGNEGYKSLFKKDIIETILPEFLDDKDEIALVNSFNGFTTAFTGFFDNRENMFSEEAKSTSIAFRCINENLTRYISNMDIFEKVDAIFDKHEVQEIKEKILNSDYDVEDFFEGEFFNFVLTQEGIDVYNAIIGGFVTESGEKIKGLNEYINLYNQKTKQKLPKFKPLYKQVLSDRESLSFYGEGYTSDEEVLEVFRNTLNKNSEIFSSIKKLEKLFKNFDEYSSAGIFVKNGPAISTISKDIFGEWNVIRDKWNAEYDDIHLKKKAVVTEKYEDDRRKSFKKIGSFSLEQLQEYADADLSVVEKLKEIIIQKVDEIYKVYGSSEKLFDADFVLEKSLKKNDAVVAIMKDLLDSVKSFENYIKAFFGEGKETNRDESFYGDFVLAYDILLKVDHIYDAIRNYVTQKPYSKDKFKLYFQNPQFMGGWDKDKETDYRATILRYGSKYYLAIMDKKYAKCLQKIDKDDVNGNYEKINYKLLPGPNKMLPKVFFSKKWMAYYNPSEDIQKIYKNGTFKKGDMFNLNDCHKLIDFFKDSISRYPKWSNAYDFNFSETEKYKDIAGFYREVEEQGYKVSFESASKKEVDKLVEEGKLYMFQIYNKDFSDKSHGTPNLHTMYFKLLFDENNHGQIRLSGGAELFMRRASLKKEELVVHPANSPIANKNPDNPKKTTTLSYDVYKDKRFSEDQYLLHIPIAINKCPKNIFKINTEVRVLLKHDDNPYVIGIDRGERNLLYIVVVDGKGNIVEQYSLNEIINNFNGIRIKTDYHSLLDKKEKERFEARQNWTSIENIKELKAGYISQVVHKICELVEKYDAVIALEDLNSGFKNSRVKVEKQVYQKFEKMLIDKLNYMVDKKSNPCATGGALKGYQITNKFESFKSMSTQNGFIFYIPAWLTSKIDPSTGFVNLLKTKYTSIADSKKFISSFDRIMYVPEEDLFEFALDYKNFSRTDADYIKKWKLYSYGNRIRIFRNPKKNNVFDWEEVCLTSAYKELFNKYGINYQQGDIRALLCEQSDKAFYSSFMALMSLMLQMRNSITGRTDVDFLISPVKNSDGIFYDSRNYEAQENAILPKNADANGAYNIARKVLWAIGQFKKAEDEKLDKVKIAISNKEWLEYAQTSVKHAPAPAPAPAMVSKGEEDNMAIIKEFMRFKVHMEGSVNGHEFEIEGEGEGRPYEGTQTAKLKVTKGGPLPFAWDILSPQFMYGSKAYVKHPADIPDYLKLSFPEGFKWERVMNFEDGGVVTVTQDSSLQDGEFIYKVKLRGTNFPSDGPVMQKKTMGWEASSERMYPEDGALKGEIKQRLKLKDGGHYDAEVKTTYKAKKPVQLPGAYNVNIKLDITSHNEDYTIVEQYERAEGRHSTGGMDELYK

SEQ ID NO: 285 - protein, 1475 aa, synthetic construct
  REGION 1..1475: note = SYNTHETIC
MSKLEKFTNCYSLSKTLRFKAIPVGKTQENIDNKRLLVEDEKRAEDYKGVKKLLDRYYLSFINDVLHSIKLKNLNNYISLFRKKTRTEKENKELENLEINLRKEIAKAFKGNEGYKSLFKKDIIETILPEFLDDKDEIALVNSFNGFTTAFTGFFDNRENMFSEEAKSTSIAFRCINENLTRYISNMDIFEKVDAIFDKHEVQEIKEKILNSDYDVEDFFEGEFFNFVLTQEGIDVYNAIIGGFVTESGEKIKGLNEYINLYNQKTKQKLPKFKPLYKQVLSDRESLSFYGEGYTSDEEVLEVFRNTLNKNSEIFSSIKKLEKLFKNFDEYSSAGIFVKNGPAISTISKDIFGEWNVIRDKWNAEYDDIHLKKKAVVTEKYEDDRRKSFKKIGSFSLEQLQEYADADLSVVEKLKEIIIQKVDEIYKVYGSSEKLFDADFVLEKSLKKNDAVVAIMKDLLDSVKSFENYIKAFFGEGKETNRDESFYGDFVLAYDILLKVDHIYDAIRNYVTQKPYSKDKFKLYFQNPQFMGGWDKDKETDYRATILRYGSKYYLAIMDKKYAKCLQKIDKDDVNGNYEKINYKLLPGPNKMLPKVFFSKKWMAYYNPSEDIQKIYKNGTFKKGDMFNLNDCHKLIDFFKDSISRYPKWSNAYDFNFSETEKYKDIAGFYREVEEQGYKVSFESASKKEVDKLVEEGKLYMFQIYNKDFSDKSHGTPNLHTMYFKLLFDENNHGQIRLSGGAELFMRRASLKKEELVVHPANSPIANKNPDNPKKTTTLSYDVYKDKRFSEDQYLLHIPIAINKCPKNIFKINTEVRVLLKHDDNPYVIGIDRGERNLLYIVVVDGKGNIVEQYSLNEIINNFNGIRIKTDYHSLLDKKEKERFEARQNWTSIENIKELKAGYISQVVHKICELVEKYDAVIALEDLNSGFKNSRVKVEKQVYQKFEKMLIDKLNYMVDKKSNPCATGGALKGYQITNKFESFKSMSTQNGFIFYIPAWLTSKIDPSTGFVNLLKTKYTSIADSKKFISSFDRIMYVPEEDLFEFALDYKNFSRTDADYIKKWKLYSYGNRIRIFRNPKKNNVFDWEEVCLTSAYKELFNKYGINYQQGDIRALLCEQSDKAFYSSFMALMSLMLQMRNSITGRTDVDFLISPVKNSDGIFYDSRNYEAQENAILPKNADANGAYNIARKVLWAIGQFKKAEDEKLDKVKIAISNKEWLEYAQTSVKHAPAPAPAPAPAMVSKGEEDNMAIIKEFMRFKVHMEGSVNGHEFEIEGEGEGRPYEGTQTAKLKVTKGGPLPFAWDILSPQFMYGSKAYVKHPADIPDYLKLSFPEGFKWERVMNFEDGGVVTVTQDSSLQDGEFIYKVKLRGTNFPSDGPVMQKKTMGWEASSERMYPEDGALKGEIKQRLKLKDGGHYDAEVKTTYKAKKPVQLPGAYNVNIKLDITSHNEDYTIVEQYERAEGRHSTGGMDELYK

SEQ ID NO: 286 - protein, 1477 aa, synthetic construct
  REGION 1..1477: note = SYNTHETIC
MSKLEKFTNCYSLSKTLRFKAIPVGKTQENIDNKRLLVEDEKRAEDYKGVKKLLDRYYLSFINDVLHSIKLKNLNNYISLFRKKTRTEKENKELENLEINLRKEIAKAFKGNEGYKSLFKKDIIETILPEFLDDKDEIALVNSFNGFTTAFTGFFDNRENMFSEEAKSTSIAFRCINENLTRYISNMDIFEKVDAIFDKHEVQEIKEKILNSDYDVEDFFEGEFFNFVLTQEGIDVYNAIIGGFVTESGEKIKGLNEYINLYNQKTKQKLPKFKPLYKQVLSDRESLSFYGEGYTSDEEVLEVFRNTLNKNSEIFSSIKKLEKLFKNFDEYSSAGIFVKNGPAISTISKDIFGEWNVIRDKWNAEYDDIHLKKKAVVTEKYEDDRRKSFKKIGSFSLEQLQEYADADLSVVEKLKEIIIQKVDEIYKVYGSSEKLFDADFVLEKSLKKNDAVVAIMKDLLDSVKSFENYIKAFFGEGKETNRDESFYGDFVLAYDILLKVDHIYDAIRNYVTQKPYSKDKFKLYFQNPQFMGGWDKDKETDYRATILRYGSKYYLAIMDKKYAKCLQKIDKDDVNGNYEKINYKLLPGPNKMLPKVFFSKKWMAYYNPSEDIQKIYKNGTFKKGDMFNLNDCHKLIDFFKDSISRYPKWSNAYDFNFSETEKYKDIAGFYREVEEQGYKVSFESASKKEVDKLVEEGKLYMFQIYNKDFSDKSHGTPNLHTMYFKLLFDENNHGQIRLSGGAELFMRRASLKKEELVVHPANSPIANKNPDNPKKTTTLSYDVYKDKRFSEDQYLLHIPIAINKCPKNIFKINTEVRVLLKHDDNPYVIGIDRGERNLLYIVVVDGKGNIVEQYSLNEIINNFNGIRIKTDYHSLLDKKEKERFEARQNWTSIENIKELKAGYISQVVHKICELVEKYDAVIALEDLNSGFKNSRVKVEKQVYQKFEKMLIDKLNYMVDKKSNPCATGGALKGYQITNKFESFKSMSTQNGFIFYIPAWLTSKIDPSTGFVNLLKTKYTSIADSKKFISSFDRIMYVPEEDLFEFALDYKNFSRTDADYIKKWKLYSYGNRIRIFRNPKKNNVFDWEEVCLTSAYKELFNKYGINYQQGDIRALLCEQSDKAFYSSFMALMSLMLQMRNSITGRTDVDFLISPVKNSDGIFYDSRNYEAQENAILPKNADANGAYNIARKVLWAIGQFKKAEDEKLDKVKIAISNKEWLEYAQTSVKHAPAPAPAPAPAPAMVSKGEEDNMAIIKEFMRFKVHMEGSVNGHEFEIEGEGEGRPYEGTQTAKLKVTKGGPLPFAWDILSPQFMYGSKAYVKHPADIPDYLKLSFPEGFKWERVMNFEDGGVVTVTQDSSLQDGEFIYKVKLRGTNFPSDGPVMQKKTMGWEASSERMYPEDGALKGEIKQRLKLKDGGHYDAEVKTTYKAKKPVQLPGAYNVNIKLDITSHNEDYTIVEQYERAEGRHSTGGMDELYK

SEQ ID NO: 287 - protein, 1479 aa, synthetic construct
  REGION 1..1479: note = SYNTHETIC
MSKLEKFTNCYSLSKTLRFKAIPVGKTQENIDNKRLLVEDEKRAEDYKGVKKLLDRYYLSFINDVLHSIKLKNLNNYISLFRKKTRTEKENKELENLEINLRKEIAKAFKGNEGYKSLFKKDIIETILPEFLDDKDEIALVNSFNGFTTAFTGFFDNRENMFSEEAKSTSIAFRCINENLTRYISNMDIFEKVDAIFDKHEVQEIKEKILNSDYDVEDFFEGEFFNFVLTQEGIDVYNAIIGGFVTESGEKIKGLNEYINLYNQKTKQKLPKFKPLYKQVLSDRESLSFYGEGYTSDEEVLEVFRNTLNKNSEIFSSIKKLEKLFKNFDEYSSAGIFVKNGPAISTISKDIFGEWNVIRDKWNAEYDDIHLKKKAVVTEKYEDDRRKSFKKIGSFSLEQLQEYADADLSVVEKLKEIIIQKVDEIYKVYGSSEKLFDADFVLEKSLKKNDAVVAIMKDLLDSVKSFENYIKAFFGEGKETNRDESFYGDFVLAYDILLKVDHIYDAIRNYVTQKPYSKDKFKLYFQNPQFMGGWDKDKETDYRATILRYGSKYYLAIMDKKYAKCLQKIDKDDVNGNYEKINYKLLPGPNKMLPKVFFSKKWMAYYNPSEDIQKIYKNGTFKKGDMFNLNDCHKLIDFFKDSISRYPKWSNAYDFNFSETEKYKDIAGFYREVEEQGYKVSFESASKKEVDKLVEEGKLYMFQIYNKDFSDKSHGTPNLHTMYFKLLFDENNHGQIRLSGGAELFMRRASLKKEELVVHPANSPIANKNPDNPKKTTTLSYDVYKDKRFSEDQYLLHIPIAINKCPKNIFKINTEVRVLLKHDDNPYVIGIDRGERNLLYIVVVDGKGNIVEQYSLNEIINNFNGIRIKTDYHSLLDKKEKERFEARQNWTSIENIKELKAGYISQVVHKICELVEKYDAVIALEDLNSGFKNSRVKVEKQVYQKFEKMLIDKLNYMVDKKSNPCATGGALKGYQITNKFESFKSMSTQNGFIFYIPAWLTSKIDPSTGFVNLLKTKYTSIADSKKFISSFDRIMYVPEEDLFEFALDYKNFSRTDADYIKKWKLYSYGNRIRIFRNPKKNNVFDWEEVCLTSAYKELFNKYGINYQQGDIRALLCEQSDKAFYSSFMALMSLMLQMRNSITGRTDVDFLISPVKNSDGIFYDSRNYEAQENAILPKNADANGAYNIARKVLWAIGQFKKAEDEKLDKVKIAISNKEWLEYAQTSVKHAPAPAPAPAPAPAPAMVSKGEEDNMAIIKEFMRFKVHMEGSVNGHEFEIEGEGEGRPYEGTQTAKLKVTKGGPLPFAWDILSPQFMYGSKAYVKHPADIPDYLKLSFPEGFKWERVMNFEDGGVVTVTQDSSLQDGEFIYKVKLRGTNFPSDGPVMQKKTMGWEASSERMYPEDGALKGEIKQRLKLKDGGHYDAEVKTTYKAKKPVQLPGAYNVNIKLDITSHNEDYTIVEQYERAEGRHSTGGMDELYK

SEQ ID NO: 288 - protein, 1481 aa, synthetic construct
  REGION 1..1481: note = SYNTHETIC
MSKLEKFTNCYSLSKTLRFKAIPVGKTQENIDNKRLLVEDEKRAEDYKGVKKLLDRYYLSFINDVLHSIKLKNLNNYISLFRKKTRTEKENKELENLEINLRKEIAKAFKGNEGYKSLFKKDIIETILPEFLDDKDEIALVNSFNGFTTAFTGFFDNRENMFSEEAKSTSIAFRCINENLTRYISNMDIFEKVDAIFDKHEVQEIKEKILNSDYDVEDFFEGEFFNFVLTQEGIDVYNAIIGGFVTESGEKIKGLNEYINLYNQKTKQKLPKFKPLYKQVLSDRESLSFYGEGYTSDEEVLEVFRNTLNKNSEIFSSIKKLEKLFKNFDEYSSAGIFVKNGPAISTISKDIFGEWNVIRDKWNAEYDDIHLKKKAVVTEKYEDDRRKSFKKIGSFSLEQLQEYADADLSVVEKLKEIIIQKVDEIYKVYGSSEKLFDADFVLEKSLKKNDAVVAIMKDLLDSVKSFENYIKAFFGEGKETNRDESFYGDFVLAYDILLKVDHIYDAIRNYVTQKPYSKDKFKLYFQNPQFMGGWDKDKETDYRATILRYGSKYYLAIMDKKYAKCLQKIDKDDVNGNYEKINYKLLPGPNKMLPKVFFSKKWMAYYNPSEDIQKIYKNGTFKKGDMFNLNDCHKLIDFFKDSISRYPKWSNAYDFNFSETEKYKDIAGFYREVEEQGYKVSFESASKKEVDKLVEEGKLYMFQIYNKDFSDKSHGTPNLHTMYFKLLFDENNHGQIRLSGGAELFMRRASLKKEELVVHPANSPIANKNPDNPKKTTTLSYDVYKDKRFSEDQYLLHIPIAINKCPKNIFKINTEVRVLLKHDDNPYVIGIDRGERNLLYIVVVDGKGNIVEQYSLNEIINNFNGIRIKTDYHSLLDKKEKERFEARQNWTSIENIKELKAGYISQVVHKICELVEKYDAVIALEDLNSGFKNSRVKVEKQVYQKFEKMLIDKLNYMVDKKSNPCATGGALKGYQITNKFESFKSMSTQNGFIFYIPAWLTSKIDPSTGFVNLLKTKYTSIADSKKFISSFDRIMYVPEEDLFEFALDYKNFSRTDADYIKKWKLYSYGNRIRIFRNPKKNNVFDWEEVCLTSAYKELFNKYGINYQQGDIRALLCEQSDKAFYSSFMALMSLMLQMRNSITGRTDVDFLISPVKNSDGIFYDSRNYEAQENAILPKNADANGAYNIARKVLWAIGQFKKAEDEKLDKVKIAISNKEWLEYAQTSVKHAPAPAPAPAPAPAPAPAMVSKGEEDNMAIIKEFMRFKVHMEGSVNGHEFEIEGEGEGRPYEGTQTAKLKVTKGGPLPFAWDILSPQFMYGSKAYVKHPADIPDYLKLSFPEGFKWERVMNFEDGGVVTVTQDSSLQDGEFIYKVKLRGTNFPSDGPVMQKKTMGWEASSERMYPEDGALKGEIKQRLKLKDGGHYDAEVKTTYKAKKPVQLPGAYNVNIKLDITSHNEDYTIVEQYERAEGRHSTGGMDELYK

SEQ ID NO: 289 - protein, 1483 aa, synthetic construct
  REGION 1..1483: note = SYNTHETIC
MSKLEKFTNCYSLSKTLRFKAIPVGKTQENIDNKRLLVEDEKRAEDYKGVKKLLDRYYLSFINDVLHSIKLKNLNNYISLFRKKTRTEKENKELENLEINLRKEIAKAFKGNEGYKSLFKKDIIETILPEFLDDKDEIALVNSFNGFTTAFTGFFDNRENMFSEEAKSTSIAFRCINENLTRYISNMDIFEKVDAIFDKHEVQEIKEKILNSDYDVEDFFEGEFFNFVLTQEGIDVYNAIIGGFVTESGEKIKGLNEYINLYNQKTKQKLPKFKPLYKQVLSDRESLSFYGEGYTSDEEVLEVFRNTLNKNSEIFSSIKKLEKLFKNFDEYSSAGIFVKNGPAISTISKDIFGEWNVIRDKWNAEYDDIHLKKKAVVTEKYEDDRRKSFKKIGSFSLEQLQEYADADLSVVEKLKEIIIQKVDEIYKVYGSSEKLFDADFVLEKSLKKNDAVVAIMKDLLDSVKSFENYIKAFFGEGKETNRDESFYGDFVLAYDILLKVDHIYDAIRNYVTQKPYSKDKFKLYFQNPQFMGGWDKDKETDYRATILRYGSKYYLAIMDKKYAKCLQKIDKDDVNGNYEKINYKLLPGPNKMLPKVFFSKKWMAYYNPSEDIQKIYKNGTFKKGDMFNLNDCHKLIDFFKDSISRYPKWSNAYDFNFSETEKYKDIAGFYREVEEQGYKVSFESASKKEVDKLVEEGKLYMFQIYNKDFSDKSHGTPNLHTMYFKLLFDENNHGQIRLSGGAELFMRRASLKKEELVVHPANSPIANKNPDNPKKTTTLSYDVYKDKRFSEDQYLLHIPIAINKCPKNIFKINTEVRVLLKHDDNPYVIGIDRGERNLLYIVVVDGKGNIVEQYSLNEIINNFNGIRIKTDYHSLLDKKEKERFEARQNWTSIENIKELKAGYISQVVHKICELVEKYDAVIALEDLNSGFKNSRVKVEKQVYQKFEKMLIDKLNYMVDKKSNPCATGGALKGYQITNKFESFKSMSTQNGFIFYIPAWLTSKIDPSTGFVNLLKTKYTSIADSKKFISSFDRIMYVPEEDLFEFALDYKNFSRTDADYIKKWKLYSYGNRIRIFRNPKKNNVFDWEEVCLTSAYKELFNKYGINYQQGDIRALLCEQSDKAFYSSFMALMSLMLQMRNSITGRTDVDFLISPVKNSDGIFYDSRNYEAQENAILPKNADANGAYNIARKVLWAIGQFKKAEDEKLDKVKIAISNKEWLEYAQTSVKHAPAPAPAPAPAPAPAPAPAMVSKGEEDNMAIIKEFMRFKVHMEGSVNGHEFEIEGEGEGRPYEGTQTAKLKVTKGGPLPFAWDILSPQFMYGSKAYVKHPADIPDYLKLSFPEGFKWERVMNFEDGGVVTVTQDSSLQDGEFIYKVKLRGTNFPSDGPVMQKKTMGWEASSERMYPEDGALKGEIKQRLKLKDGGHYDAEVKTTYKAKKPVQLPGAYNVNIKLDITSHNEDYTIVEQYERAEGRHSTGGMDELYK

SEQ ID NO: 290 - protein, 1485 aa, synthetic construct
  REGION 1..1485: note = SYNTHETIC
MSKLEKFTNCYSLSKTLRFKAIPVGKTQENIDNKRLLVEDEKRAEDYKGVKKLLDRYYLSFINDVLHSIKLKNLNNYISLFRKKTRTEKENKELENLEINLRKEIAKAFKGNEGYKSLFKKDIIETILPEFLDDKDEIALVNSFNGFTTAFTGFFDNRENMFSEEAKSTSIAFRCINENLTRYISNMDIFEKVDAIFDKHEVQEIKEKILNSDYDVEDFFEGEFFNFVLTQEGIDVYNAIIGGFVTESGEKIKGLNEYINLYNQKTKQKLPKFKPLYKQVLSDRESLSFYGEGYTSDEEVLEVFRNTLNKNSEIFSSIKKLEKLFKNFDEYSSAGIFVKNGPAISTISKDIFGEWNVIRDKWNAEYDDIHLKKKAVVTEKYEDDRRKSFKKIGSFSLEQLQEYADADLSVVEKLKEIIIQKVDEIYKVYGSSEKLFDADFVLEKSLKKNDAVVAIMKDLLDSVKSFENYIKAFFGEGKETNRDESFYGDFVLAYDILLKVDHIYDAIRNYVTQKPYSKDKFKLYFQNPQFMGGWDKDKETDYRATILRYGSKYYLAIMDKKYAKCLQKIDKDDVNGNYEKINYKLLPGPNKMLPKVFFSKKWMAYYNPSEDIQKIYKNGTFKKGDMFNLNDCHKLIDFFKDSISRYPKWSNAYDFNFSETEKYKDIAGFYREVEEQGYKVSFESASKKEVDKLVEEGKLYMFQIYNKDFSDKSHGTPNLHTMYFKLLFDENNHGQIRLSGGAELFMRRASLKKEELVVHPANSPIANKNPDNPKKTTTLSYDVYKDKRFSEDQYLLHIPIAINKCPKNIFKINTEVRVLLKHDDNPYVIGIDRGERNLLYIVVVDGKGNIVEQYSLNEIINNFNGIRIKTDYHSLLDKKEKERFEARQNWTSIENIKELKAGYISQVVHKICELVEKYDAVIALEDLNSGFKNSRVKVEKQVYQKFEKMLIDKLNYMVDKKSNPCATGGALKGYQITNKFESFKSMSTQNGFIFYIPAWLTSKIDPSTGFVNLLKTKYTSIADSKKFISSFDRIMYVPEEDLFEFALDYKNFSRTDADYIKKWKLYSYGNRIRIFRNPKKNNVFDWEEVCLTSAYKELFNKYGINYQQGDIRALLCEQSDKAFYSSFMALMSLMLQMRNSITGRTDVDFLISPVKNSDGIFYDSRNYEAQENAILPKNADANGAYNIARKVLWAIGQFKKAEDEKLDKVKIAISNKEWLEYAQTSVKHAPAPAPAPAPAPAPAPAPAPAMVSKGEEDNMAIIKEFMRFKVHMEGSVNGHEFEIEGEGEGRPYEGTQTAKLKVTKGGPLPFAWDILSPQFMYGSKAYVKHPADIPDYLKLSFPEGFKWERVMNFEDGGVVTVTQDSSLQDGEFIYKVKLRGTNFPSDGPVMQKKTMGWEASSERMYPEDGALKGEIKQRLKLKDGGHYDAEVKTTYKAKKPVQLPGAYNVNIKLDITSHNEDYTIVEQYERAEGRHSTGGMDELYK

SEQ ID NO: 291 - protein, 1487 aa, synthetic construct
  REGION 1..1487: note = SYNTHETIC
MSKLEKFTNCYSLSKTLRFKAIPVGKTQENIDNKRLLVEDEKRAEDYKGVKKLLDRYYLSFINDVLHSIKLKNLNNYISLFRKKTRTEKENKELENLEINLRKEIAKAFKGNEGYKSLFKKDIIETILPEFLDDKDEIALVNSFNGFTTAFTGFFDNRENMFSEEAKSTSIAFRCINENLTRYISNMDIFEKVDAIFDKHEVQEIKEKILNSDYDVEDFFEGEFFNFVLTQEGIDVYNAIIGGFVTESGEKIKGLNEYINLYNQKTKQKLPKFKPLYKQVLSDRESLSFYGEGYTSDEEVLEVFRNTLNKNSEIFSSIKKLEKLFKNFDEYSSAGIFVKNGPAISTISKDIFGEWNVIRDKWNAEYDDIHLKKKAVVTEKYEDDRRKSFKKIGSFSLEQLQEYADADLSVVEKLKEIIIQKVDEIYKVYGSSEKLFDADFVLEKSLKKNDAVVAIMKDLLDSVKSFENYIKAFFGEGKETNRDESFYGDFVLAYDILLKVDHIYDAIRNYVTQKPYSKDKFKLYFQNPQFMGGWDKDKETDYRATILRYGSKYYLAIMDKKYAKCLQKIDKDDVNGNYEKINYKLLPGPNKMLPKVFFSKKWMAYYNPSEDIQKIYKNGTFKKGDMFNLNDCHKLIDFFKDSISRYPKWSNAYDFNFSETEKYKDIAGFYREVEEQGYKVSFESASKKEVDKLVEEGKLYMFQIYNKDFSDKSHGTPNLHTMYFKLLFDENNHGQIRLSGGAELFMRRASLKKEELVVHPANSPIANKNPDNPKKTTTLSYDVYKDKRFSEDQYLLHIPIAINKCPKNIFKINTEVRVLLKHDDNPYVIGIDRGERNLLYIVVVDGKGNIVEQYSLNEIINNFNGIRIKTDYHSLLDKKEKERFEARQNWTSIENIKELKAGYISQVVHKICELVEKYDAVIALEDLNSGFKNSRVKVEKQVYQKFEKMLIDKLNYMVDKKSNPCATGGALKGYQITNKFESFKSMSTQNGFIFYIPAWLTSKIDPSTGFVNLLKTKYTSIADSKKFISSFDRIMYVPEEDLFEFALDYKNFSRTDADYIKKWKLYSYGNRIRIFRNPKKNNVFDWEEVCLTSAYKELFNKYGINYQQGDIRALLCEQSDKAFYSSFMALMSLMLQMRNSITGRTDVDFLISPVKNSDGIFYDSRNYEAQENAILPKNADANGAYNIARKVLWAIGQFKKAEDEKLDKVKIAISNKEWLEYAQTSVKHAPAPAPAPAPAPAPAPAPAPAPAMVSKGEEDNMAIIKEFMRFKVHMEGSVNGHEFEIEGEGEGRPYEGTQTAKLKVTKGGPLPFAWDILSPQFMYGSKAYVKHPADIPDYLKLSFPEGFKWERVMNFEDGGVVTVTQDSSLQDGEFIYKVKLRGTNFPSDGPVMQKKTMGWEASSERMYPEDGALKGEIKQRLKLKDGGHYDAEVKTTYKAKKPVQLPGAYNVNIKLDITSHNEDYTIVEQYERAEGRHSTGGMDELYK

SEQ ID NO: 292 - protein, 1489 aa, synthetic construct
  REGION 1..1489: note = SYNTHETIC
MSKLEKFTNCYSLSKTLRFKAIPVGKTQENIDNKRLLVEDEKRAEDYKGVKKLLDRYYLSFINDVLHSIKLKNLNNYISLFRKKTRTEKENKELENLEINLRKEIAKAFKGNEGYKSLFKKDIIETILPEFLDDKDEIALVNSFNGFTTAFTGFFDNRENMFSEEAKSTSIAFRCINENLTRYISNMDIFEKVDAIFDKHEVQEIKEKILNSDYDVEDFFEGEFFNFVLTQEGIDVYNAIIGGFVTESGEKIKGLNEYINLYNQKTKQKLPKFKPLYKQVLSDRESLSFYGEGYTSDEEVLEVFRNTLNKNSEIFSSIKKLEKLFKNFDEYSSAGIFVKNGPAISTISKDIFGEWNVIRDKWNAEYDDIHLKKKAVVTEKYEDDRRKSFKKIGSFSLEQLQEYADADLSVVEKLKEIIIQKVDEIYKVYGSSEKLFDADFVLEKSLKKNDAVVAIMKDLLDSVKSFENYIKAFFGEGKETNRDESFYGDFVLAYDILLKVDHIYDAIRNYVTQKPYSKDKFKLYFQNPQFMGGWDKDKETDYRATILRYGSKYYLAIMDKKYAKCLQKIDKDDVNGNYEKINYKLLPGPNKMLPKVFFSKKWMAYYNPSEDIQKIYKNGTFKKGDMFNLNDCHKLIDFFKDSISRYPKWSNAYDFNFSETEKYKDIAGFYREVEEQGYKVSFESASKKEVDKLVEEGKLYMFQIYNKDFSDKSHGTPNLHTMYFKLLFDENNHGQIRLSGGAELFMRRASLKKEELVVHPANSPIANKNPDNPKKTTTLSYDVYKDKRFSEDQYLLHIPIAINKCPKNIFKINTEVRVLLKHDDNPYVIGIDRGERNLLYIVVVDGKGNIVEQYSLNEIINNFNGIRIKTDYHSLLDKKEKERFEARQNWTSIENIKELKAGYISQVVHKICELVEKYDAVIALEDLNSGFKNSRVKVEKQVYQKFEKMLIDKLNYMVDKKSNPCATGGALKGYQITNKFESFKSMSTQNGFIFYIPAWLTSKIDPSTGFVNLLKTKYTSIADSKKFISSFDRIMYVPEEDLFEFALDYKNFSRTDADYIKKWKLYSYGNRIRIFRNPKKNNVFDWEEVCLTSAYKELFNKYGINYQQGDIRALLCEQSDKAFYSSFMALMSLMLQMRNSITGRTDVDFLISPVKNSDGIFYDSRNYEAQENAILPKNADANGAYNIARKVLWAIGQFKKAEDEKLDKVKIAISNKEWLEYAQTSVKHAPAPAPAPAPAPAPAPAPAPAPAPAMVSKGEEDNMAIIKEFMRFKVHMEGSVNGHEFEIEGEGEGRPYEGTQTAKLKVTKGGPLPFAWDILSPQFMYGSKAYVKHPADIPDYLKLSFPEGFKWERVMNFEDGGVVTVTQDSSLQDGEFIYKVKLRGTNFPSDGPVMQKKTMGWEASSERMYPEDGALKGEIKQRLKLKDGGHYDAEVKTTYKAKKPVQLPGAYNVNIKLDITSHNEDYTIVEQYERAEGRHSTGGMDELYK

SEQ ID NO: 293 - protein, 1491 aa, synthetic construct
  REGION 1..1491: note = SYNTHETIC
MSKLEKFTNCYSLSKTLRFKAIPVGKTQENIDNKRLLVEDEKRAEDYKGVKKLLDRYYLSFINDVLHSIKLKNLNNYISLFRKKTRTEKENKELENLEINLRKEIAKAFKGNEGYKSLFKKDIIETILPEFLDDKDEIALVNSFNGFTTAFTGFFDNRENMFSEEAKSTSIAFRCINENLTRYISNMDIFEKVDAIFDKHEVQEIKEKILNSDYDVEDFFEGEFFNFVLTQEGIDVYNAIIGGFVTESGEKIKGLNEYINLYNQKTKQKLPKFKPLYKQVLSDRESLSFYGEGYTSDEEVLEVFRNTLNKNSEIFSSIKKLEKLFKNFDEYSSAGIFVKNGPAISTISKDIFGEWNVIRDKWNAEYDDIHLKKKAVVTEKYEDDRRKSFKKIGSFSLEQLQEYADADLSVVEKLKEIIIQKVDEIYKVYGSSEKLFDADFVLEKSLKKNDAVVAIMKDLLDSVKSFENYIKAFFGEGKETNRDESFYGDFVLAYDILLKVDHIYDAIRNYVTQKPYSKDKFKLYFQNPQFMGGWDKDKETDYRATILRYGSKYYLAIMDKKYAKCLQKIDKDDVNGNYEKINYKLLPGPNKMLPKVFFSKKWMAYYNPSEDIQKIYKNGTFKKGDMFNLNDCHKLIDFFKDSISRYPKWSNAYDFNFSETEKYKDIAGFYREVEEQGYKVSFESASKKEVDKLVEEGKLYMFQIYNKDFSDKSHGTPNLHTMYFKLLFDENNHGQIRLSGGAELFMRRASLKKEELVVHPANSPIANKNPDNPKKTTTLSYDVYKDKRFSEDQYLLHIPIAINKCPKNIFKINTEVRVLLKHDDNPYVIGIDRGERNLLYIVVVDGKGNIVEQYSLNEIINNFNGIRIKTDYHSLLDKKEKERFEARQNWTSIENIKELKAGYISQVVHKICELVEKYDAVIALEDLNSGFKNSRVKVEKQVYQKFEKMLIDKLNYMVDKKSNPCATGGALKGYQITNKFESFKSMSTQNGFIFYIPAWLTSKIDPSTGFVNLLKTKYTSIADSKKFISSFDRIMYVPEEDLFEFALDYKNFSRTDADYIKKWKLYSYGNRIRIFRNPKKNNVFDWEEVCLTSAYKELFNKYGINYQQGDIRALLCEQSDKAFYSSFMALMSLMLQMRNSITGRTDVDFLISPVKNSDGIFYDSRNYEAQENAILPKNADANGAYNIARKVLWAIGQFKKAEDEKLDKVKIAISNKEWLEYAQTSVKHAPAPAPAPAPAPAPAPAPAPAPAPAPAMVSKGEEDNMAIIKEFMRFKVHMEGSVNGHEFEIEGEGEGRPYEGTQTAKLKVTKGGPLPFAWDILSPQFMYGSKAYVKHPADIPDYLKLSFPEGFKWERVMNFEDGGVVTVTQDSSLQDGEFIYKVKLRGTNFPSDGPVMQKKTMGWEASSERMYPEDGALKGEIKQRLKLKDGGHYDAEVKTTYKAKKPVQLPGAYNVNIKLDITSHNEDYTIVEQYERAEGRHSTGGMDELYK

SEQ ID NO: 294 - protein, 1493 aa, synthetic construct
  REGION 1..1493: note = SYNTHETIC
MSKLEKFTNCYSLSKTLRFKAIPVGKTQENIDNKRLLVEDEKRAEDYKGVKKLLDRYYLSFINDVLHSIKLKNLNNYISLFRKKTRTEKENKELENLEINLRKEIAKAFKGNEGYKSLFKKDIIETILPEFLDDKDEIALVNSFNGFTTAFTGFFDNRENMFSEEAKSTSIAFRCINENLTRYISNMDIFEKVDAIFDKHEVQEIKEKILNSDYDVEDFFEGEFFNFVLTQEGIDVYNAIIGGFVTESGEKIKGLNEYINLYNQKTKQKLPKFKPLYKQVLSDRESLSFYGEGYTSDEEVLEVFRNTLNKNSEIFSSIKKLEKLFKNFDEYSSAGIFVKNGPAISTISKDIFGEWNVIRDKWNAEYDDIHLKKKAVVTEKYEDDRRKSFKKIGSFSLEQLQEYADADLSVVEKLKEIIIQKVDEIYKVYGSSEKLFDADFVLEKSLKKNDAVVAIMKDLLDSVKSFENYIKAFFGEGKETNRDESFYGDFVLAYDILLKVDHIYDAIRNYVTQKPYSKDKFKLYFQNPQFMGGWDKDKETDYRATILRYGSKYYLAIMDKKYAKCLQKIDKDDVNGNYEKINYKLLPGPNKMLPKVFFSKKWMAYYNPSEDIQKIYKNGTFKKGDMFNLNDCHKLIDFFKDSISRYPKWSNAYDFNFSETEKYKDIAGFYREVEEQGYKVSFESASKKEVDKLVEEGKLYMFQIYNKDFSDKSHGTPNLHTMYFKLLFDENNHGQIRLSGGAELFMRRASLKKEELVVHPANSPIANKNPDNPKKTTTLSYDVYKDKRFSEDQYLLHIPIAINKCPKNIFKINTEVRVLLKHDDNPYVIGIDRGERNLLYIVVVDGKGNIVEQYSLNEIINNFNGIRIKTDYHSLLDKKEKERFEARQNWTSIENIKELKAGYISQVVHKICELVEKYDAVIALEDLNSGFKNSRVKVEKQVYQKFEKMLIDKLNYMVDKKSNPCATGGALKGYQITNKFESFKSMSTQNGFIFYIPAWLTSKIDPSTGFVNLLKTKYTSIADSKKFISSFDRIMYVPEEDLFEFALDYKNFSRTDADYIKKWKLYSYGNRIRIFRNPKKNNVFDWEEVCLTSAYKELFNKYGINYQQGDIRALLCEQSDKAFYSSFMALMSLMLQMRNSITGRTDVDFLISPVKNSDGIFYDSRNYEAQENAILPKNADANGAYNIARKVLWAIGQFKKAEDEKLDKVKIAISNKEWLEYAQTSVKHAPAPAPAPAPAPAPAPAPAPAPAPAPAPAMVSKGEEDNMAIIKEFMRFKVHMEGSVNGHEFEIEGEGEGRPYEGTQTAKLKVTKGGPLPFAWDILSPQFMYGSKAYVKHPADIPDYLKLSFPEGFKWERVMNFEDGGVVTVTQDSSLQDGEFIYKVKLRGTNFPSDGPVMQKKTMGWEASSERMYPEDGALKGEIKQRLKLKDGGHYDAEVKTTYKAKKPVQLPGAYNVNIKLDITSHNEDYTIVEQYERAEGRHSTGGMDELYK

SEQ ID NO: 295 - protein, 1466 aa, synthetic construct
  REGION 1..1466: note = SYNTHETIC
  VARIANT 1229: note = X can be any naturally occurring amino acid
MSKLEKFTNCYSLSKTLRFKAIPVGKTQENIDNKRLLVEDEKRAEDYKGVKKLLDRYYLSFINDVLHSIKLKNLNNYISLFRKKTRTEKENKELENLEINLRKEIAKAFKGNEGYKSLFKKDIIETILPEFLDDKDEIALVNSFNGFTTAFTGFFDNRENMFSEEAKSTSIAFRCINENLTRYISNMDIFEKVDAIFDKHEVQEIKEKILNSDYDVEDFFEGEFFNFVLTQEGIDVYNAIIGGFVTESGEKIKGLNEYINLYNQKTKQKLPKFKPLYKQVLSDRESLSFYGEGYTSDEEVLEVFRNTLNKNSEIFSSIKKLEKLFKNFDEYSSAGIFVKNGPAISTISKDIFGEWNVIRDKWNAEYDDIHLKKKAVVTEKYEDDRRKSFKKIGSFSLEQLQEYADADLSVVEKLKEIIIQKVDEIYKVYGSSEKLFDADFVLEKSLKKNDAVVAIMKDLLDSVKSFENYIKAFFGEGKETNRDESFYGDFVLAYDILLKVDHIYDAIRNYVTQKPYSKDKFKLYFQNPQFMGGWDKDKETDYRATILRYGSKYYLAIMDKKYAKCLQKIDKDDVNGNYEKINYKLLPGPNKMLPKVFFSKKWMAYYNPSEDIQKIYKNGTFKKGDMFNLNDCHKLIDFFKDSISRYPKWSNAYDFNFSETEKYKDIAGFYREVEEQGYKVSFESASKKEVDKLVEEGKLYMFQIYNKDFSDKSHGTPNLHTMYFKLLFDENNHGQIRLSGGAELFMRRASLKKEELVVHPANSPIANKNPDNPKKTTTLSYDVYKDKRFSEDQYLLHIPIAINKCPKNIFKINTEVRVLLKHDDNPYVIGIDRGERNLLYIVVVDGKGNIVEQYSLNEIINNFNGIRIKTDYHSLLDKKEKERFEARQNWTSIENIKELKAGYISQVVHKICELVEKYDAVIALEDLNSGFKNSRVKVEKQVYQKFEKMLIDKLNYMVDKKSNPCATGGALKGYQITNKFESFKSMSTQNGFIFYIPAWLTSKIDPSTGFVNLLKTKYTSIADSKKFISSFDRIMYVPEEDLFEFALDYKNFSRTDADYIKKWKLYSYGNRIRIFRNPKKNNVFDWEEVCLTSAYKELFNKYGINYQQGDIRALLCEQSDKAFYSSFMALMSLMLQMRNSITGRTDVDFLISPVKNSDGIFYDSRNYEAQENAILPKNADANGAYNIARKVLWAIGQFKKAEDEKLDKVKIAISNKEWLEYAQTSVKHXPMVSKGEEDNMAIIKEFMRFKVHMEGSVNGHEFEIEGEGEGRPYEGTQTAKLKVTKGGPLPFAWDILSPQFMYGSKAYVKHPADIPDYLKLSFPEGFKWERVMNFEDGGVVTVTQDSSLQDGEFIYKVKLRGTNFPSDGPVMQKKTMGWEASSERMYPEDGALKGEIKQRLKLKDGGHYDAEVKTTYKAKKPVQLPGAYNVNIKLDITSHNEDYTIVEQYERAEGRHSTGGMDELYK

SEQ ID NO: 296 - protein, 1468 aa, synthetic construct
  REGION 1..1468: note = SYNTHETIC
  VARIANT 1229: note = X can be any naturally occurring amino acid
  VARIANT 1231: note = X can be any naturally occurring amino acid
MSKLEKFTNCYSLSKTLRFKAIPVGKTQENIDNKRLLVEDEKRAEDYKGVKKLLDRYYLSFINDVLHSIKLKNLNNYISLFRKKTRTEKENKELENLEINLRKEIAKAFKGNEGYKSLFKKDIIETILPEFLDDKDEIALVNSFNGFTTAFTGFFDNRENMFSEEAKSTSIAFRCINENLTRYISNMDIFEKVDAIFDKHEVQEIKEKILNSDYDVEDFFEGEFFNFVLTQEGIDVYNAIIGGFVTESGEKIKGLNEYINLYNQKTKQKLPKFKPLYKQVLSDRESLSFYGEGYTSDEEVLEVFRNTLNKNSEIFSSIKKLEKLFKNFDEYSSAGIFVKNGPAISTISKDIFGEWNVIRDKWNAEYDDIHLKKKAVVTEKYEDDRRKSFKKIGSFSLEQLQEYADADLSVVEKLKEIIIQKVDEIYKVYGSSEKLFDADFVLEKSLKKNDAVVAIMKDLLDSVKSFENYIKAFFGEGKETNRDESFYGDFVLAYDILLKVDHIYDAIRNYVTQKPYSKDKFKLYFQNPQFMGGWDKDKETDYRATILRYGSKYYLAIMDKKYAKCLQKIDKDDVNGNYEKINYKLLPGPNKMLPKVFFSKKWMAYYNPSEDIQKIYKNGTFKKGDMFNLNDCHKLIDFFKDSISRYPKWSNAYDFNFSETEKYKDIAGFYREVEEQGYKVSFESASKKEVDKLVEEGKLYMFQIYNKDFSDKSHGTPNLHTMYFKLLFDENNHGQIRLSGGAELFMRRASLKKEELVVHPANSPIANKNPDNPKKTTTLSYDVYKDKRFSEDQYLLHIPIAINKCPKNIFKINTEVRVLLKHDDNPYVIGIDRGERNLLYIVVVDGKGNIVEQYSLNEIINNFNGIRIKTDYHSLLDKKEKERFEARQNWTSIENIKELKAGYISQVVHKICELVEKYDAVIALEDLNSGFKNSRVKVEKQVYQKFEKMLIDKLNYMVDKKSNPCATGGALKGYQITNKFESFKSMSTQNGFIFYIPAWLTSKIDPSTGFVNLLKTKYTSIADSKKFISSFDRIMYVPEEDLFEFALDYKNFSRTDADYIKKWKLYSYGNRIRIFRNPKKNNVFDWEEVCLTSAYKELFNKYGINYQQGDIRALLCEQSDKAFYSSFMALMSLMLQMRNSITGRTDVDFLISPVKNSDGIFYDSRNYEAQENAILPKNADANGAYNIARKVLWAIGQFKKAEDEKLDKVKIAISNKEWLEYAQTSVKHXPXPMVSKGEEDNMAIIKEFMRFKVHMEGSVNGHEFEIEGEGEGRPYEGTQTAKLKVTKGGPLPFAWDILSPQFMYGSKAYVKHPADIPDYLKLSFPEGFKWERVMNFEDGGVVTVTQDSSLQDGEFIYKVKLRGTNFPSDGPVMQKKTMGWEASSERMYPEDGALKGEIKQRLKLKDGGHYDAEVKTTYKAKKPVQLPGAYNVNIKLDITSHNEDYTIVEQYERAEGRHSTGGMDELYK

SEQ ID NO: 297 - protein, 1470 aa, synthetic construct
  REGION 1..1470: note = SYNTHETIC
  VARIANT 1229: note = X can be any naturally occurring amino acid
  VARIANT 1231: note = X can be any naturally occurring amino acid
  VARIANT 1233: note = X can be any naturally occurring amino acid
MSKLEKFTNCYSLSKTLRFKAIPVGKTQENIDNKRLLVEDEKRAEDYKGVKKLLDRYYLSFINDVLHSIKLKNLNNYISLFRKKTRTEKENKELENLEINLRKEIAKAFKGNEGYKSLFKKDIIETILPEFLDDKDEIALVNSFNGFTTAFTGFFDNRENMFSEEAKSTSIAFRCINENLTRYISNMDIFEKVDAIFDKHEVQEIKEKILNSDYDVEDFFEGEFFNFVLTQEGIDVYNAIIGGFVTESGEKIKGLNEYINLYNQKTKQKLPKFKPLYKQVLSDRESLSFYGEGYTSDEEVLEVFRNTLNKNSEIFSSIKKLEKLFKNFDEYSSAGIFVKNGPAISTISKDIFGEWNVIRDKWNAEYDDIHLKKKAVVTEKYEDDRRKSFKKIGSFSLEQLQEYADADLSVVEKLKEIIIQKVDEIYKVYGSSEKLFDADFVLEKSLKKNDAVVAIMKDLLDSVKSFENYIKAFFGEGKETNRDESFYGDFVLAYDILLKVDHIYDAIRNYVTQKPYSKDKFKLYFQNPQFMGGWDKDKETDYRATILRYGSKYYLAIMDKKYAKCLQKIDKDDVNGNYEKINYKLLPGPNKMLPKVFFSKKWMAYYNPSEDIQKIYKNGTFKKGDMFNLNDCHKLIDFFKDSISRYPKWSNAYDFNFSETEKYKDIAGFYREVEEQGYKVSFESASKKEVDKLVEEGKLYMFQIYNKDFSDKSHGTPNLHTMYFKLLFDENNHGQIRLSGGAELFMRRASLKKEELVVHPANSPIANKNPDNPKKTTTLSYDVYKDKRFSEDQYLLHIPIAINKCPKNIFKINTEVRVLLKHDDNPYVIGIDRGERNLLYIVVVDGKGNIVEQYSLNEIINNFNGIRIKTDYHSLLDKKEKERFEARQNWTSIENIKELKAGYISQVVHKICELVEKYDAVIALEDLNSGFKNSRVKVEKQVYQKFEKMLIDKLNYMVDKKSNPCATGGALKGYQITNKFESFKSMSTQNGFIFYIPAWLTSKIDPSTGFVNLLKTKYTSIADSKKFISSFDRIMYVPEEDLFEFALDYKNFSRTDADYIKKWKLYSYGNRIRIFRNPKKNNVFDWEEVCLTSAYKELFNKYGINYQQGDIRALLCEQSDKAFYSSFMALMSLMLQMRNSITGRTDVDFLISPVKNSDGIFYDSRNYEAQENAILPKNADANGAYNIARKVLWAIGQFKKAEDEKLDKVKIAISNKEWLEYAQTSVKHXPXPXPMVSKGEEDNMAIIKEFMRFKVHMEGSVNGHEFEIEGEGEGRPYEGTQTAKLKVTKGGPLPFAWDILSPQFMYGSKAYVKHPADIPDYLKLSFPEGFKWERVMNFEDGGVVTVTQDSSLQDGEFIYKVKLRGTNFPSDGPVMQKKTMGWEASSERMYPEDGALKGEIKQRLKLKDGGHYDAEVKTTYKAKKPVQLPGAYNVNIKLDITSHNEDYTIVEQYERAEGRHSTGGMDELYK

SEQ ID NO: 298 - protein, 1472 aa, synthetic construct
  REGION 1..1472: note = SYNTHETIC
  VARIANT 1229: note = X can be any naturally occurring amino acid
  VARIANT 1231: note = X can be any naturally occurring amino acid
  VARIANT 1233: note = X can be any naturally occurring amino acid
  VARIANT 1235: note = X can be any naturally occurring amino acid
MSKLEKFTNCYSLSKTLRFKAIPVGKTQENIDNKRLLVEDEKRAEDYKGVKKLLDRYYLSFINDVLHSIKLKNLNNYISLFRKKTRTEKENKELENLEINLRKEIAKAFKGNEGYKSLFKKDIIETILPEFLDDKDEIALVNSFNGFTTAFTGFFDNRENMFSEEAKSTSIAFRCINENLTRYISNMDIFEKVDAIFDKHEVQEIKEKILNSDYDVEDFFEGEFFNFVLTQEGIDVYNAIIGGFVTESGEKIKGLNEYINLYNQKTKQKLPKFKPLYKQVLSDRESLSFYGEGYTSDEEVLEVFRNTLNKNSEIFSSIKKLEKLFKNFDEYSSAGIFVKNGPAISTISKDIFGEWNVIRDKWNAEYDDIHLKKKAVVTEKYEDDRRKSFKKIGSFSLEQLQEYADADLSVVEKLKEIIIQKVDEIYKVYGSSEKLFDADFVLEKSLKKNDAVVAIMKDLLDSVKSFENYIKAFFGEGKETNRDESFYGDFVLAYDILLKVDHIYDAIRNYVTQKPYSKDKFKLYFQNPQFMGGWDKDKETDYRATILRYGSKYYLAIMDKKYAKCLQKIDKDDVNGNYEKINYKLLPGPNKMLPKVFFSKKWMAYYNPSEDIQKIYKNGTFKKGDMFNLNDCHKLIDFFKDSISRYPKWSNAYDFNFSETEKYKDIAGFYREVEEQGYKVSFESASKKEVDKLVEEGKLYMFQIYNKDFSDKSHGTPNLHTMYFKLLFDENNHGQIRLSGGAELFMRRASLKKEELVVHPANSPIANKNPDNPKKTTTLSYDVYKDKRFSEDQYLLHIPIAINKCPKNIFKINTEVRVLLKHDDNPYVIGIDRGERNLLYIVVVDGKGNIVEQYSLNEIINNFNGIRIKTDYHSLLDKKEKERFEARQNWTSIENIKELKAGYISQVVHKICELVEKYDAVIALEDLNSGFKNSRVKVEKQVYQKFEKMLIDKLNYMVDKKSNPCATGGALKGYQITNKFESFKSMSTQNGFIFYIPAWLTSKIDPSTGFVNLLKTKYTSIADSKKFISSFDRIMYVPEEDLFEFALDYKNFSRTDADYIKKWKLYSYGNRIRIFRNPKKNNVFDWEEVCLTSAYKELFNKYGINYQQGDIRALLCEQSDKAFYSSFMALMSLMLQMRNSITGRTDVDFLISPVKNSDGIFYDSRNYEAQENAILPKNADANGAYNIARKVLWAIGQFKKAEDEKLDKVKIAISNKEWLEYAQTSVKHXPXPXPXPMVSKGEEDNMAIIKEFMRFKVHMEGSVNGHEFEIEGEGEGRPYEGTQTAKLKVTKGGPLPFAWDILSPQFMYGSKAYVKHPADIPDYLKLSFPEGFKWERVMNFEDGGVVTVTQDSSLQDGEFIYKVKLRGTNFPSDGPVMQKKTMGWEASSERMYPEDGALKGEIKQRLKLKDGGHYDAEVKTTYKAKKPVQLPGAYNVNIKLDITSHNEDYTIVEQYERAEGRHSTGGMDELYK

SEQ ID NO: 299 - protein, 1474 aa, synthetic construct
  REGION 1..1474: note = SYNTHETIC
  VARIANT 1229: note = X can be any naturally occurring amino acid
  VARIANT 1231: note = X can be any naturally occurring amino acid
  VARIANT 1233: note = X can be any naturally occurring amino acid
  VARIANT 1235: note = X can be any naturally occurring amino acid
  VARIANT 1237: note = X can be any naturally occurring amino acid
MSKLEKFTNCYSLSKTLRFKAIPVGKTQENIDNKRLLVEDEKRAEDYKGVKKLLDRYYLSFINDVLHSIKLKNLNNYISLFRKKTRTEKENKELENLEINLRKEIAKAFKGNEGYKSLFKKDIIETILPEFLDDKDEIALVNSFNGFTTAFTGFFDNRENMFSEEAKSTSIAFRCINENLTRYISNMDIFEKVDAIFDKHEVQEIKEKILNSDYDVEDFFEGEFFNFVLTQEGIDVYNAIIGGFVTESGEKIKGLNEYINLYNQKTKQKLPKFKPLYKQVLSDRESLSFYGEGYTSDEEVLEVFRNTLNKNSEIFSSIKKLEKLFKNFDEYSSAGIFVKNGPAISTISKDIFGEWNVIRDKWNAEYDDIHLKKKAVVTEKYEDDRRKSFKKIGSFSLEQLQEYADADLSVVEKLKEIIIQKVDEIYKVYGSSEKLFDADFVLEKSLKKNDAVVAIMKDLLDSVKSFENYIKAFFGEGKETNRDESFYGDFVLAYDILLKVDHIYDAIRNYVTQKPYSKDKFKLYFQNPQFMGGWDKDKETDYRATILRYGSKYYLAIMDKKYAKCLQKIDKDDVNGNYEKINYKLLPGPNKMLPKVFFSKKWMAYYNPSEDIQKIYKNGTFKKGDMFNLNDCHKLIDFFKDSISRYPKWSNAYDFNFSETEKYKDIAGFYREVEEQGYKVSFESASKKEVDKLVEEGKLYMFQIYNKDFSDKSHGTPNLHTMYFKLLFDENNHGQIRLSGGAELFMRRASLKKEELVVHPANSPIANKNPDNPKKTTTLSYDVYKDKRFSEDQYLLHIPIAINKCPKNIFKINTEVRVLLKHDDNPYVIGIDRGERNLLYIVVVDGKGNIVEQYSLNEIINNFNGIRIKTDYHSLLDKKEKERFEARQNWTSIENIKELKAGYISQVVHKICELVEKYDAVIALEDLNSGFKNSRVKVEKQVYQKFEKMLIDKLNYMVDKKSNPCATGGALKGYQITNKFESFKSMSTQNGFIFYIPAWLTSKIDPSTGFVNLLKTKYTSIADSKKFISSFDRIMYVPEEDLFEFALDYKNFSRTDADYIKKWKLYSYGNRIRIFRNPKKNNVFDWEEVCLTSAYKELFNKYGINYQQGDIRALLCEQSDKAFYSSFMALMSLMLQMRNSITGRTDVDFLISPVKNSDGIFYDSRNYEAQENAILPKNADANGAYNIARKVLWAIGQFKKAEDEKLDKVKIAISNKEWLEYAQTSVKHXPXPXPXPXPMVSKGEEDNMAIIKEFMRFKVHMEGSVNGHEFEIEGEGEGRPYEGTQTAKLKVTKGGPLPFAWDILSPQFMYGSKAYVKHPADIPDYLKLSFPEGFKWERVMNFEDGGVVTVTQDSSLQDGEFIYKVKLRGTNFPSDGPVMQKKTMGWEASSERMYPEDGALKGEIKQRLKLKDGGHYDAEVKTTYKAKKPVQLPGAYNVNIKLDITSHNEDYTIVEQYERAEGRHSTGGMDELYK

SEQ ID NO: 300 - protein, 1476 aa, synthetic construct
  REGION 1..1476: note = SYNTHETIC
  VARIANT 1229: note = X can be any naturally occurring amino acid
  VARIANT 1231: note = X can be any naturally occurring amino acid
  VARIANT 1233: note = X can be any naturally occurring amino acid
  VARIANT 1235: note = X can be any naturally occurring amino acid
  VARIANT 1237: note = X can be any naturally occurring amino acid
  VARIANT 1239: note = X can be any naturally occurring amino acid
MSKLEKFTNCYSLSKTLRFKAIPVGKTQENIDNKRLLVEDEKRAEDYKGVKKLLDRYYLSFINDVLHSIKLKNLNNYISLFRKKTRTEKENKELENLEINLRKEIAKAFKGNEGYKSLFKKDIIETILPEFLDDKDEIALVNSFNGFTTAFTGFFDNRENMFSEEAKSTSIAFRCINENLTRYISNMDIFEKVDAIFDKHEVQEIKEKILNSDYDVEDFFEGEFFNFVLTQEGIDVYNAIIGGFVTESGEKIKGLNEYINLYNQKTKQKLPKFKPLYKQVLSDRESLSFYGEGYTSDEEVLEVFRNTLNKNSEIFSSIKKLEKLFKNFDEYSSAGIFVKNGPAISTISKDIFGEWNVIRDKWNAEYDDIHLKKKAVVTEKYEDDRRKSFKKIGSFSLEQLQEYADADLSVVEKLKEIIIQKVDEIYKVYGSSEKLFDADFVLEKSLKKNDAVVAIMKDLLDSVKSFENYIKAFFGEGKETNRDESFYGDFVLAYDILLKVDHIYDAIRNYVTQKPYSKDKFKLYFQNPQFMGGWDKDKETDYRATILRYGSKYYLAIMDKKYAKCLQKIDKDDVNGNYEKINYKLLPGPNKMLPKVFFSKKWMAYYNPSEDIQKIYKNGTFKKGDMFNLNDCHKLIDFFKDSISRYPKWSNAYDFNFSETEKYKDIAGFYREVEEQGYKVSFESASKKEVDKLVEEGKLYMFQIYNKDFSDKSHGTPNLHTMYFKLLFDENNHGQIRLSGGAELFMRRASLKKEELVVHPANSPIANKNPDNPKKTTTLSYDVYKDKRFSEDQYLLHIPIAINKCPKNIFKINTEVRVLLKHDDNPYVIGIDRGERNLLYIVVVDGKGNIVEQYSLNEIINNFNGIRIKTDYHSLLDKKEKERFEARQNWTSIENIKELKAGYISQVVHKICELVEKYDAVIALEDLNSGFKNSRVKVEKQVYQKFEKMLIDKLNYMVDKKSNPCATGGALKGYQITNKFESFKSMSTQNGFIFYIPAWLTSKIDPSTGFVNLLKTKYTSIADSKKFISSFDRIMYVPEEDLFEFALDYKNFSRTDADYIKKWKLYSYGNRIRIFRNPKKNNVFDWEEVCLTSAYKELFNKYGINYQQGDIRALLCEQSDKAFYSSFMALMSLMLQMRNSITGRTDVDFLISPVKNSDGIFYDSRNYEAQENAILPKNADANGAYNIARKVLWAIGQFKKAEDEKLDKVKIAISNKEWLEYAQTSVKHXPXPXPXPXPXPMVSKGEEDNMAIIKEFMRFKVHMEGSVNGHEFEIEGEGEGRPYEGTQTAKLKVTKGGPLPFAWDILSPQFMYGSKAYVKHPADIPDYLKLSFPEGFKWERVMNFEDGGVVTVTQDSSLQDGEFIYKVKLRGTNFPSDGPVMQKKTMGWEASSERMYPEDGALKGEIKQRLKLKDGGHYDAEVKTTYKAKKPVQLPGAYNVNIKLDITSHNEDYTIVEQYERAEGRHSTGGMDELYK

SEQ ID NO: 301 - protein, 1478 aa, synthetic construct
  REGION 1..1478: note = SYNTHETIC
  VARIANT 1229: note = X can be any naturally occurring amino acid
  VARIANT 1231: note = X can be any naturally occurring amino acid
  VARIANT 1233: note = X can be any naturally occurring amino acid
  VARIANT 1235: note = X can be any naturally occurring amino acid
  VARIANT 1237: note = X can be any naturally occurring amino acid
  VARIANT 1239: note = X can be any naturally occurring amino acid
  VARIANT 1241: note = X can be any naturally occurring amino acid
MSKLEKFTNCYSLSKTLRFKAIPVGKTQENIDNKRLLVEDEKRAEDYKGVKKLLDRYYLSFINDVLHSIKLKNLNNYISLFRKKTRTEKENKELENLEINLRKEIAKAFKGNEGYKSLFKKDIIETILPEFLDDKDEIALVNSFNGFTTAFTGFFDNRENMFSEEAKSTSIAFRCINENLTRYISNMDIFEKVDAIFDKHEVQEIKEKILNSDYDVEDFFEGEFFNFVLTQEGIDVYNAIIGGFVTESGEKIKGLNEYINLYNQKTKQKLPKFKPLYKQVLSDRESLSFYGEGYTSDEEVLEVFRNTLNKNSEIFSSIKKLEKLFKNFDEYSSAGIFVKNGPAISTISKDIFGEWNVIRDKWNAEYDDIHLKKKAVVTEKYEDDRRKSFKKIGSFSLEQLQEYADADLSVVEKLKEIIIQKVDEIYKVYGSSEKLFDADFVLEKSLKKNDAVVAIMKDLLDSVKSFENYIKAFFGEGKETNRDESFYGDFVLAYDILLKVDHIYDAIRNYVTQKPYSKDKFKLYFQNPQFMGGWDKDKETDYRATILRYGSKYYLAIMDKKYAKCLQKIDKDDVNGNYEKINYKLLPGPNKMLPKVFFSKKWMAYYNPSEDIQKIYKNGTFKKGDMFNLNDCHKLIDFFKDSISRYPKWSNAYDFNFSETEKYKDIAGFYREVEEQGYKVSFESASKKEVDKLVEEGKLYMFQIYNKDFSDKSHGTPNLHTMYFKLLFDENNHGQIRLSGGAELFMRRASLKKEELVVHPANSPIANKNPDNPKKTTTLSYDVYKDKRFSEDQYLLHIPIAINKCPKNIFKINTEVRVLLKHDDNPYVIGIDRGERNLLYIVVVDGKGNIVEQYSLNEIINNFNGIRIKTDYHSLLDKKEKERFEARQNWTSIENIKELKAGYISQVVHKICELVEKYDAVIALEDLNSGFKNSRVKVEKQVYQKFEKMLIDKLNYMVDKKSNPCATGGALKGYQITNKFESFKSMSTQNGFIFYIPAWLTSKIDPSTGFVNLLKTKYTSIADSKKFISSFDRIMYVPEEDLFEFALDYKNFSRTDADYIKKWKLYSYGNRIRIFRNPKKNNVFDWEEVCLTSAYKELFNKYGINYQQGDIRALLCEQSDKAFYSSFMALMSLMLQMRNSITGRTDVDFLISPVKNSDGIFYDSRNYEAQENAILPKNADANGAYNIARKVLWAIGQFKKAEDEKLDKVKIAISNKEWLEYAQTSVKHXPXPXPXPXPXPXPMVSKGEEDNMAIIKEFMRFKVHMEGSVNGHEFEIEGEGEGRPYEGTQTAKLKVTKGGPLPFAWDILSPQFMYGSKAYVKHPADIPDYLKLSFPEGFKWERVMNFEDGGVVTVTQDSSLQDGEFIYKVKLRGTNFPSDGPVMQKKTMGWEASSERMYPEDGALKGEIKQRLKLKDGGHYDAEVKTTYKAKKPVQLPGAYNVNIKLDITSHNEDYTIVEQYERAEGRHSTGGMDELYK

SEQ ID NO: 302 - protein, 1480 aa, synthetic construct
  REGION 1..1480: note = SYNTHETIC
  VARIANT 1229: note = X can be any naturally occurring amino acid
  VARIANT 1231: note = X can be any naturally occurring amino acid
  VARIANT 1233: note = X can be any naturally occurring amino acid
  VARIANT 1235: note = X can be any naturally occurring amino acid
  VARIANT 1237: note = X can be any naturally occurring amino acid
  VARIANT 1239: note = X can be any naturally occurring amino acid
  VARIANT 1241: note = X can be any naturally occurring amino acid
  VARIANT 1243: note = X can be any naturally occurring amino acid
MSKLEKFTNCYSLSKTLRFKAIPVGKTQENIDNKRLLVEDEKRAEDYKGVKKLLDRYYLSFINDVLHSIKLKNLNNYISLFRKKTRTEKENKELENLEINLRKEIAKAFKGNEGYKSLFKKDIIETILPEFLDDKDEIALVNSFNGFTTAFTGFFDNRENMFSEEAKSTSIAFRCINENLTRYISNMDIFEKVDAIFDKHEVQEIKEKILNSDYDVEDFFEGEFFNFVLTQEGIDVYNAIIGGFVTESGEKIKGLNEYINLYNQKTKQKLPKFKPLYKQVLSDRESLSFYGEGYTSDEEVLEVFRNTLNKNSEIFSSIKKLEKLFKNFDEYSSAGIFVKNGPAISTISKDIFGEWNVIRDKWNAEYDDIHLKKKAVVTEKYEDDRRKSFKKIGSFSLEQLQEYADADLSVVEKLKEIIIQKVDEIYKVYGSSEKLFDADFVLEKSLKKNDAVVAIMKDLLDSVKSFENYIKAFFGEGKETNRDESFYGDFVLAYDILLKVDHIYDAIRNYVTQKPYSKDKFKLYFQNPQFMGGWDKDKETDYRATILRYGSKYYLAIMDKKYAKCLQKIDKDDVNGNYEKINYKLLPGPNKMLPKVFFSKKWMAYYNPSEDIQKIYKNGTFKKGDMFNLNDCHKLIDFFKDSISRYPKWSNAYDFNFSETEKYKDIAGFYREVEEQGYKVSFESASKKEVDKLVEEGKLYMFQIYNKDFSDKSHGTPNLHTMYFKLLFDENNHGQIRLSGGAELFMRRASLKKEELVVHPANSPIANKNPDNPKKTTTLSYDVYKDKRFSEDQYLLHIPIAINKCPKNIFKINTEVRVLLKHDDNPYVIGIDRGERNLLYIVVVDGKGNIVEQYSLNEIINNFNGIRIKTDYHSLLDKKEKERFEARQNWTSIENIKELKAGYISQVVHKICELVEKYDAVIALEDLNSGFKNSRVKVEKQVYQKFEKMLIDKLNYMVDKKSNPCATGGALKGYQITNKFESFKSMSTQNGFIFYIPAWLTSKIDPSTGFVNLLKTKYTSIADSKKFISSFDRIMYVPEEDLFEFALDYKNFSRTDADYIKKWKLYSYGNRIRIFRNPKKNNVFDWEEVCLTSAYKELFNKYGINYQQGDIRALLCEQSDKAFYSSFMALMSLMLQMRNSITGRTDVDFLISPVKNSDGIFYDSRNYEAQENAILPKNADANGAYNIARKVLWAIGQFKKAEDEKLDKVKIAISNKEWLEYAQTSVKHXPXPXPXPXPXPXPXPMVSKGEEDNMAIIKEFMRFKVHMEGSVNGHEFEIEGEGEGRPYEGTQTAKLKVTKGGPLPFAWDILSPQFMYGSKAYVKHPADIPDYLKLSFPEGFKWERVMNFEDGGVVTVTQDSSLQDGEFIYKVKLRGTNFPSDGPVMQKKTMGWEASSERMYPEDGALKGEIKQRLKLKDGGHYDAEVKTTYKAKKPVQLPGAYNVNIKLDITSHNEDYTIVEQYERAEGRHSTGGMDELYK

SEQ ID NO: 303 - protein, 1482 aa, synthetic construct
  REGION 1..1482: note = SYNTHETIC
  VARIANT 1229: note = X can be any naturally occurring amino acid
  VARIANT 1231: note = X can be any naturally occurring amino acid
  VARIANT 1233: note = X can be any naturally occurring amino acid
  VARIANT 1235: note = X can be any naturally occurring amino acid
  VARIANT 1237: note = X can be any naturally occurring amino acid
  VARIANT 1239: note = X can be any naturally occurring amino acid
  VARIANT 1241: note = X can be any naturally occurring amino acid
  VARIANT 1243: note = X can be any naturally occurring amino acid
  VARIANT 1245: note = X can be any naturally occurring amino acid
MSKLEKFTNCYSLSKTLRFKAIPVGKTQENIDNKRLLVEDEKRAEDYKGVKKLLDRYYLSFINDVLHSIKLKNLNNYISLFRKKTRTEKENKELENLEINLRKEIAKAFKGNEGYKSLFKKDIIETILPEFLDDKDEIALVNSFNGFTTAFTGFFDNRENMFSEEAKSTSIAFRCINENLTRYISNMDIFEKVDAIFDKHEVQEIKEKILNSDYDVEDFFEGEFFNFVLTQEGIDVYNAIIGGFVTESGEKIKGLNEYINLYNQKTKQKLPKFKPLYKQVLSDRESLSFYGEGYTSDEEVLEVFRNTLNKNSEIFSSIKKLEKLFKNFDEYSSAGIFVKNGPAISTISKDIFGEWNVIRDKWNAEYDDIHLKKKAVVTEKYEDDRRKSFKKIGSFSLEQLQEYADADLSVVEKLKEIIIQKVDEIYKVYGSSEKLFDADFVLEKSLKKNDAVVAIMKDLLDSVKSFENYIKAFFGEGKETNRDESFYGDFVLAYDILLKVDHIYDAIRNYVTQKPYSKDKFKLYFQNPQFMGGWDKDKETDYRATILRYGSKYYLAIMDKKYAKCLQKIDKDDVNGNYEKINYKLLPGPNKMLPKVFFSKKWMAYYNPSEDIQKIYKNGTFKKGDMFNLNDCHKLIDFFKDSISRYPKWSNAYDFNFSETEKYKDIAGFYREVEEQGYKVSFESASKKEVDKLVEEGKLYMFQIYNKDFSDKSHGTPNLHTMYFKLLFDENNHGQIRLSGGAELFMRRASLKKEELVVHPANSPIANKNPDNPKKTTTLSYDVYKDKRFSEDQYLLHIPIAINKCPKNIFKINTEVRVLLKHDDNPYVIGIDRGERNLLYIVVVDGKGNIVEQYSLNEIINNFNGIRIKTDYHSLLDKKEKERFEARQNWTSIENIKELKAGYISQVVHKICELVEKYDAVIALEDLNSGFKNSRVKVEKQVYQKFEKMLIDKLNYMVDKKSNPCATGGALKGYQITNKFESFKSMSTQNGFIFYIPAWLTSKIDPSTGFVNLLKTKYTSIADSKKFISSFDRIMYVPEEDLFEFALDYKNFSRTDADYIKKWKLYSYGNRIRIFRNPKKNNVFDWEEVCLTSAYKELFNKYGINYQQGDIRALLCEQSDKAFYSSFMALMSLMLQMRNSITGRTDVDFLISPVKNSDGIFYDSRNYEAQENAILPKNADANGAYNIARKVLWAIGQFKKAEDEKLDKVKIAISNKEWLEYAQTSVKHXPXPXPXPXPXPXPXPXPMVSKGEEDNMAIIKEFMRFKVHMEGSVNGHEFEIEGEGEGRPYEGTQTAKLKVTKGGPLPFAWDILSPQFMYGSKAYVKHPADIPDYLKLSFPEGFKWERVMNFEDGGVVTVTQDSSLQDGEFIYKVKLRGTNFPSDGPVMQKKTMGWEASSERMYPEDGALKGEIKQRLKLKDGGHYDAEVKTTYKAKKPVQLPGAYNVNIKLDITSHNEDYTIVEQYERAEGRHSTGGMDELYK

SEQ ID NO: 304 - protein, 1484 aa, synthetic construct
  REGION 1..1484: note = SYNTHETIC
  VARIANT 1229: note = X can be any naturally occurring amino acid
  VARIANT 1231: note = X can be any naturally occurring amino acid
  VARIANT 1233: note = X can be any naturally occurring amino acid
  VARIANT 1235: note = X can be any naturally occurring amino acid
  VARIANT 1237: note = X can be any naturally occurring amino acid
  VARIANT 1239: note = X can be any naturally occurring amino acid
  VARIANT 1241: note = X can be any naturally occurring amino acid
  VARIANT 1243: note = X can be any naturally occurring amino acid
  VARIANT 1245: note = X can be any naturally occurring amino acid
  VARIANT 1247: note = X can be any naturally occurring amino acid
MSKLEKFTNCYSLSKTLRFKAIPVGKTQENIDNKRLLVEDEKRAEDYKGVKKLLDRYYLSFINDVLHSIKLKNLNNYISLFRKKTRTEKENKELENLEINLRKEIAKAFKGNEGYKSLFKKDIIETILPEFLDDKDEIALVNSFNGFTTAFTGFFDNRENMFSEEAKSTSIAFRCINENLTRYISNMDIFEKVDAIFDKHEVQEIKEKILNSDYDVEDFFEGEFFNFVLTQEGIDVYNAIIGGFVTESGEKIKGLNEYINLYNQKTKQKLPKFKPLYKQVLSDRESLSFYGEGYTSDEEVLEVFRNTLNKNSEIFSSIKKLEKLFKNFDEYSSAGIFVKNGPAISTISKDIFGEWNVIRDKWNAEYDDIHLKKKAVVTEKYEDDRRKSFKKIGSFSLEQLQEYADADLSVVEKLKEIIIQKVDEIYKVYGSSEKLFDADFVLEKSLKKNDAVVAIMKDLLDSVKSFENYIKAFFGEGKETNRDESFYGDFVLAYDILLKVDHIYDAIRNYVTQKPYSKDKFKLYFQNPQFMGGWDKDKETDYRATILRYGSKYYLAIMDKKYAKCLQKIDKDDVNGNYEKINYKLLPGPNKMLPKVFFSKKWMAYYNPSEDIQKIYKNGTFKKGDMFNLNDCHKLIDFFKDSISRYPKWSNAYDFNFSETEKYKDIAGFYREVEEQGYKVSFESASKKEVDKLVEEGKLYMFQIYNKDFSDKSHGTPNLHTMYFKLLFDENNHGQIRLSGGAELFMRRASLKKEELVVHPANSPIANKNPDNPKKTTTLSYDVYKDKRFSEDQYLLHIPIAINKCPKNIFKINTEVRVLLKHDDNPYVIGIDRGERNLLYIVVVDGKGNIVEQYSLNEIINNFNGIRIKTDYHSLLDKKEKERFEARQNWTSIENIKELKAGYISQVVHKICELVEKYDAVIALEDLNSGFKNSRVKVEKQVYQKFEKMLIDKLNYMVDKKSNPCATGGALKGYQITNKFESFKSMSTQNGFIFYIPAWLTSKIDPSTGFVNLLKTKYTSIADSKKFISSFDRIMYVPEEDLFEFALDYKNFSRTDADYIKKWKLYSYGNRIRIFRNPKKNNVFDWEEVCLTSAYKELFNKYGINYQQGDIRALLCEQSDKAFYSSFMALMSLMLQMRNSITGRTDVDFLISPVKNSDGIFYDSRNYEAQENAILPKNADANGAYNIARKVLWAIGQFKKAEDEKLDKVKIAISNKEWLEYAQTSVKHXPXPXPXPXPXPXPXPXPXPMVSKGEEDNMAIIKEFMRFKVHMEGSVNGHEFEIEGEGEGRPYEGTQTAKLKVTKGGPLPFAWDILSPQFMYGSKAYVKHPADIPDYLKLSFPEGFKWERVMNFEDGGVVTVTQDSSLQDGEFIYKVKLRGTNFPSDGPVMQKKTMGWEASSERMYPEDGALKGEIKQRLKLKDGGHYDAEVKTTYKAKKPVQLPGAYNVNIKLDITSHNEDYTIVEQYERAEGRHSTGGMDELYK

SEQ ID NO: 305 - protein, 1486 aa, synthetic construct
  REGION 1..1486: note = SYNTHETIC
  VARIANT 1229: note = X can be any naturally occurring amino acid
  VARIANT 1231: note = X can be any naturally occurring amino acid
  VARIANT 1233: note = X can be any naturally occurring amino acid
  VARIANT 1235: note = X can be any naturally occurring amino acid
  VARIANT 1237: note = X can be any naturally occurring amino acid
  VARIANT 1239: note = X can be any naturally occurring amino acid
  VARIANT 1241: note = X can be any naturally occurring amino acid
  VARIANT 1243: note = X can be any naturally occurring amino acid
  VARIANT 1245: note = X can be any naturally occurring amino acid
  VARIANT 1247: note = X can be any naturally occurring amino acid
  VARIANT 1249: note = X can be any naturally occurring amino acid
MSKLEKFTNCYSLSKTLRFKAIPVGKTQENIDNKRLLVEDEKRAEDYKGVKKLLDRYYLSFINDVLHSIKLKNLNNYISLFRKKTRTEKENKELENLEINLRKEIAKAFKGNEGYKSLFKKDIIETILPEFLDDKDEIALVNSFNGFTTAFTGFFDNRENMFSEEAKSTSIAFRCINENLTRYISNMDIFEKVDAIFDKHEVQEIKEKILNSDYDVEDFFEGEFFNFVLTQEGIDVYNAIIGGFVTESGEKIKGLNEYINLYNQKTKQKLPKFKPLYKQVLSDRESLSFYGEGYTSDEEVLEVFRNTLNKNSEIFSSIKKLEKLFKNFDEYSSAGIFVKNGPAISTISKDIFGEWNVIRDKWNAEYDDIHLKKKAVVTEKYEDDRRKSFKKIGSFSLEQLQEYADADLSVVEKLKEIIIQKVDEIYKVYGSSEKLFDADFVLEKSLKKNDAVVAIMKDLLDSVKSFENYIKAFFGEGKETNRDESFYGDFVLAYDILLKVDHIYDAIRNYVTQKPYSKDKFKLYFQNPQFMGGWDKDKETDYRATILRYGSKYYLAIMDKKYAKCLQKIDKDDVNGNYEKINYKLLPGPNKMLPKVFFSKKWMAYYNPSEDIQKIYKNGTFKKGDMFNLNDCHKLIDFFKDSISRYPKWSNAYDFNFSETEKYKDIAGFYREVEEQGYKVSFESASKKEVDKLVEEGKLYMFQIYNKDFSDKSHGTPNLHTMYFKLLFDENNHGQIRLSGGAELFMRRASLKKEELVVHPANSPIANKNPDNPKKTTTLSYDVYKDKRFSEDQYLLHIPIAINKCPKNIFKINTEVRVLLKHDDNPYVIGIDRGERNLLYIVVVDGKGNIVEQYSLNEIINNFNGIRIKTDYHSLLDKKEKERFEARQNWTSIENIKELKAGYISQVVHKICELVEKYDAVIALEDLNSGFKNSRVKVEKQVYQKFEKMLIDKLNYMVDKKSNPCATGGALKGYQITNKFESFKSMSTQNGFIFYIPAWLTSKIDPSTGFVNLLKTKYTSIADSKKFISSFDRIMYVPEEDLFEFALDYKNFSRTDADYIKKWKLYSYGNRIRIFRNPKKNNVFDWEEVCLTSAYKELFNKYGINYQQGDIRALLCEQSDKAFYSSFMALMSLMLQMRNSITGRTDVDFLISPVKNSDGIFYDSRNYEAQENAILPKNADANGAYNIARKVLWAIGQFKKAEDEKLDKVKIAISNKEWLEYAQTSVKHXPXPXPXPXPXPXPXPXPXPXPMVSKGEEDNMAIIKEFMRFKVHMEGSVNGHEFEIEGEGEGRPYEGTQTAKLKVTKGGPLPFAWDILSPQFMYGSKAYVKHPADIPDYLKLSFPEGFKWERVMNFEDGGVVTVTQDSSLQDGEFIYKVKLRGTNFPSDGPVMQKKTMGWEASSERMYPEDGALKGEIKQRLKLKDGGHYDAEVKTTYKAKKPVQLPGAYNVNIKLDITSHNEDYTIVEQYERAEGRHSTGGMDELYK

SEQ ID NO: 306 - protein, 1488 aa, synthetic construct
  REGION 1..1488: note = SYNTHETIC
  VARIANT 1229: note = X can be any naturally occurring amino acid
  VARIANT 1231: note = X can be any naturally occurring amino acid
  VARIANT 1233: note = X can be any naturally occurring amino acid
  VARIANT 1235: note = X can be any naturally occurring amino acid
  VARIANT 1237: note = X can be any naturally occurring amino acid
  VARIANT 1239: note = X can be any naturally occurring amino acid
  VARIANT 1241: note = X can be any naturally occurring amino acid
  VARIANT 1243: note = X can be any naturally occurring amino acid
  VARIANT 1245: note = X can be any naturally occurring amino acid
  VARIANT 1247: note = X can be any naturally occurring amino acid
  VARIANT 1249: note = X can be any naturally occurring amino acid
  VARIANT 1251: note = X can be any naturally occurring amino acid
MSKLEKFTNCYSLSKTLRFKAIPVGKTQENIDNKRLLVEDEKRAEDYKGVKKLLDRYYLSFINDVLHSIKLKNLNNYISLFRKKTRTEKENKELENLEINLRKEIAKAFKGNEGYKSLFKKDIIETILPEFLDDKDEIALVNSFNGFTTAFTGFFDNRENMFSEEAKSTSIAFRCINENLTRYISNMDIFEKVDAIFDKHEVQEIKEKILNSDYDVEDFFEGEFFNFVLTQEGIDVYNAIIGGFVTESGEKIKGLNEYINLYNQKTKQKLPKFKPLYKQVLSDRESLSFYGEGYTSDEEVLEVFRNTLNKNSEIFSSIKKLEKLFKNFDEYSSAGIFVKNGPAISTISKDIFGEWNVIRDKWNAEYDDIHLKKKAVVTEKYEDDRRKSFKKIGSFSLEQLQEYADADLSVVEKLKEIIIQKVDEIYKVYGSSEKLFDADFVLEKSLKKNDAVVAIMKDLLDSVKSFENYIKAFFGEGKETNRDESFYGDFVLAYDILLKVDHIYDAIRNYVTQKPYSKDKFKLYFQNPQFMGGWDKDKETDYRATILRYGSKYYLAIMDKKYAKCLQKIDKDDVNGNYEKINYKLLPGPNKMLPKVFFSKKWMAYYNPSEDIQKIYKNGTFKKGDMFNLNDCHKLIDFFKDSISRYPKWSNAYDFNFSETEKYKDIAGFYREVEEQGYKVSFESASKKEVDKLVEEGKLYMFQIYNKDFSDKSHGTPNLHTMYFKLLFDENNHGQIRLSGGAELFMRRASLKKEELVVHPANSPIANKNPDNPKKTTTLSYDVYKDKRFSEDQYLLHIPIAINKCPKNIFKINTEVRVLLKHDDNPYVIGIDRGERNLLYIVVVDGKGNIVEQYSLNEIINNFNGIRIKTDYHSLLDKKEKERFEARQNWTSIENIKELKAGYISQVVHKICELVEKYDAVIALEDLNSGFKNSRVKVEKQVYQKFEKMLIDKLNYMVDKKSNPCATGGALKGYQITNKFESFKSMSTQNGFIFYIPAWLTSKIDPSTGFVNLLKTKYTSIADSKKFISSFDRIMYVPEEDLFEFALDYKNFSRTDADYIKKWKLYSYGNRIRIFRNPKKNNVFDWEEVCLTSAYKELFNKYGINYQQGDIRALLCEQSDKAFYSSFMALMSLMLQMRNSITGRTDVDFLISPVKNSDGIFYDSRNYEAQENAILPKNADANGAYNIARKVLWAIGQFKKAEDEKLDKVKIAISNKEWLEYAQTSVKHXPXPXPXPXPXPXPXPXPXPXPXPMVSKGEEDNMAIIKEFMRFKVHMEGSVNGHEFEIEGEGEGRPYEGTQTAKLKVTKGGPLPFAWDILSPQFMYGSKAYVKHPADIPDYLKLSFPEGFKWERVMNFEDGGVVTVTQDSSLQDGEFIYKVKLRGTNFPSDGPVMQKKTMGWEASSERMYPEDGALKGEIKQRLKLKDGGHYDAEVKTTYKAKKPVQLPGAYNVNIKLDITSHNEDYTIVEQYERAEGRHSTGGMDELYK

SEQ ID NO: 307 - protein, 1490 aa, synthetic construct
  REGION 1..1490: note = SYNTHETIC
  VARIANT 1229: note = X can be any naturally occurring amino acid
  VARIANT 1231: note = X can be any naturally occurring amino acid
  VARIANT 1233: note = X can be any naturally occurring amino acid
  VARIANT 1235: note = X can be any naturally occurring amino acid
  VARIANT 1237: note = X can be any naturally occurring amino acid
  VARIANT 1239: note = X can be any naturally occurring amino acid
  VARIANT 1241: note = X can be any naturally occurring amino acid
  VARIANT 1243: note = X can be any naturally occurring amino acid
  VARIANT 1245: note = X can be any naturally occurring amino acid
  VARIANT 1247: note = X can be any naturally occurring amino acid
  VARIANT 1249: note = X can be any naturally occurring amino acid
  VARIANT 1251: note = X can be any naturally occurring amino acid
  VARIANT 1253: note = X can be any naturally occurring amino acid
MSKLEKFTNCYSLSKTLRFKAIPVGKTQENIDNKRLLVEDEKRAEDYKGVKKLLDRYYLSFINDVLHSIKLKNLNNYISLFRKKTRTEKENKELENLEINLRKEIAKAFKGNEGYKSLFKKDIIETILPEFLDDKDEIALVNSFNGFTTAFTGFFDNRENMFSEEAKSTSIAFRCINENLTRYISNMDIFEKVDAIFDKHEVQEIKEKILNSDYDVEDFFEGEFFNFVLTQEGIDVYNAIIGGFVTESGEKIKGLNEYINLYNQKTKQKLPKFKPLYKQVLSDRESLSFYGEGYTSDEEVLEVFRNTLNKNSEIFSSIKKLEKLFKNFDEYSSAGIFVKNGPAISTISKDIFGEWNVIRDKWNAEYDDIHLKKKAVVTEKYEDDRRKSFKKIGSFSLEQLQEYADADLSVVEKLKEIIIQKVDEIYKVYGSSEKLFDADFVLEKSLKKNDAVVAIMKDLLDSVKSFENYIKAFFGEGKETNRDESFYGDFVLAYDILLKVDHIYDAIRNYVTQKPYSKDKFKLYFQNPQFMGGWDKDKETDYRATILRYGSKYYLAIMDKKYAKCLQKIDKDDVNGNYEKINYKLLPGPNKMLPKVFFSKKWMAYYNPSEDIQKIYKNGTFKKGDMFNLNDCHKLIDFFKDSISRYPKWSNAYDFNFSETEKYKDIAGFYREVEEQGYKVSFESASKKEVDKLVEEGKLYMFQIYNKDFSDKSHGTPNLHTMYFKLLFDENNHGQIRLSGGAELFMRRASLKKEELVVHPANSPIANKNPDNPKKTTTLSYDVYKDKRFSEDQYLLHIPIAINKCPKNIFKINTEVRVLLKHDDNPYVIGIDRGERNLLYIVVVDGKGNIVEQYSLNEIINNFNGIRIKTDYHSLLDKKEKERFEARQNWTSIENIKELKAGYISQVVHKICELVEKYDAVIALEDLNSGFKNSRVKVEKQVYQKFEKMLIDKLNYMVDKKSNPCATGGALKGYQITNKFESFKSMSTQNGFIFYIPAWLTSKIDPSTGFVNLLKTKYTSIADSKKFISSFDRIMYVPEEDLFEFALDYKNFSRTDADYIKKWKLYSYGNRIRIFRNPKKNNVFDWEEVCLTSAYKELFNKYGINYQQGDIRALLCEQSDKAFYSSFMALMSLMLQMRNSITGRTDVDFLISPVKNSDGIFYDSRNYEAQENAILPKNADANGAYNIARKVLWAIGQFKKAEDEKLDKVKIAISNKEWLEYAQTSVKHXPXPXPXPXPXPXPXPXPXPXPXPXPMVSKGEEDNMAIIKEFMRFKVHMEGSVNGHEFEIEGEGEGRPYEGTQTAKLKVTKGGPLPFAWDILSPQFMYGSKAYVKHPADIPDYLKLSFPEGFKWERVMNFEDGGVVTVTQDSSLQDGEFIYKVKLRGTNFPSDGPVMQKKTMGWEASSERMYPEDGALKGEIKQRLKLKDGGHYDAEVKTTYKAKKPVQLPGAYNVNIKLDITSHNEDYTIVEQYERAEGRHSTGGMDELYK

SEQ ID NO: 308 - protein, 1492 aa, synthetic construct
  REGION 1..1492: note = SYNTHETIC
  VARIANT 1229: note = X can be any naturally occurring amino acid
  VARIANT 1231: note = X can be any naturally occurring amino acid
  VARIANT 1233: note = X can be any naturally occurring amino acid
  VARIANT 1235: note = X can be any naturally occurring amino acid
  VARIANT 1237: note = X can be any naturally occurring amino acid
  VARIANT 1239: note = X can be any naturally occurring amino acid
  VARIANT 1241: note = X can be any naturally occurring amino acid
  VARIANT 1243: note = X can be any naturally occurring amino acid
  VARIANT 1245: note = X can be any naturally occurring amino acid
  VARIANT 1247: note = X can be any naturally occurring amino acid
  VARIANT 1249: note = X can be any naturally occurring amino acid
  VARIANT 1251: note = X can be any naturally occurring amino acid
  VARIANT 1253: note = X can be any naturally occurring amino acid
  VARIANT 1255: note = X can be any naturally occurring amino acid
MSKLEKFTNCYSLSKTLRFKAIPVGKTQENIDNKRLLVEDEKRAEDYKGVKKLLDRYYLSFINDVLHSIKLKNLNNYISLFRKKTRTEKENKELENLEINLRKEIAKAFKGNEGYKSLFKKDIIETILPEFLDDKDEIALVNSFNGFTTAFTGFFDNRENMFSEEAKSTSIAFRCINENLTRYISNMDIFEKVDAIFDKHEVQEIKEKILNSDYDVEDFFEGEFFNFVLTQEGIDVYNAIIGGFVTESGEKIKGLNEYINLYNQKTKQKLPKFKPLYKQVLSDRESLSFYGEGYTSDEEVLEVFRNTLNKNSEIFSSIKKLEKLFKNFDEYSSAGIFVKNGPAISTISKDIFGEWNVIRDKWNAEYDDIHLKKKAVVTEKYEDDRRKSFKKIGSFSLEQLQEYADADLSVVEKLKEIIIQKVDEIYKVYGSSEKLFDADFVLEKSLKKNDAVVAIMKDLLDSVKSFENYIKAFFGEGKETNRDESFYGDFVLAYDILLKVDHIYDAIRNYVTQKPYSKDKFKLYFQNPQFMGGWDKDKETDYRATILRYGSKYYLAIMDKKYAKCLQKIDKDDVNGNYEKINYKLLPGPNKMLPKVFFSKKWMAYYNPSEDIQKIYKNGTFKKGDMFNLNDCHKLIDFFKDSISRYPKWSNAYDFNFSETEKYKDIAGFYREVEEQGYKVSFESASKKEVDKLVEEGKLYMFQIYNKDFSDKSHGTPNLHTMYFKLLFDENNHGQIRLSGGAELFMRRASLKKEELVVHPANSPIANKNPDNPKKTTTLSYDVYKDKRFSEDQYLLHIPIAINKCPKNIFKINTEVRVLLKHDDNPYVIGIDRGERNLLYIVVVDGKGNIVEQYSLNEIINNFNGIRIKTDYHSLLDKKEKERFEARQNWTSIENIKELKAGYISQVVHKICELVEKYDAVIALEDLNSGFKNSRVKVEKQVYQKFEKMLIDKLNYMVDKKSNPCATGGALKGYQITNKFESFKSMSTQNGFIFYIPAWLTSKIDPSTGFVNLLKTKYTSIADSKKFISSFDRIMYVPEEDLFEFALDYKNFSRTDADYIKKWKLYSYGNRIRIFRNPKKNNVFDWEEVCLTSAYKELFNKYGINYQQGDIRALLCEQSDKAFYSSFMALMSLMLQMRNSITGRTDVDFLISPVKNSDGIFYDSRNYEAQENAILPKNADANGAYNIARKVLWAIGQFKKAEDEKLDKVKIAISNKEWLEYAQTSVKHXPXPXPXPXPXPXPXPXPXPXPXPXPXPMVSKGEEDNMAIIKEFMRFKVHMEGSVNGHEFEIEGEGEGRPYEGTQTAKLKVTKGGPLPFAWDILSPQFMYGSKAYVKHPADIPDYLKLSFPEGFKWERVMNFEDGGVVTVTQDSSLQDGEFIYKVKLRGTNFPSDGPVMQKKTMGWEASSERMYPEDGALKGEIKQRLKLKDGGHYDAEVKTTYKAKKPVQLPGAYNVNIKLDITSHNEDYTIVEQYERAEGRHSTGGMDELYK

SEQ ID NO: 309 - protein, 1479 aa, synthetic construct
  REGION 1..1479: note = SYNTHETIC
MSKLEKFTNCYSLSKTLRFKAIPVGKTQENIDNKRLLVEDEKRAEDYKGVKKLLDRYYLSFINDVLHSIKLKNLNNYISLFRKKTRTEKENKELENLEINLRKEIAKAFKGNEGYKSLFKKDIIETILPEFLDDKDEIALVNSFNGFTTAFTGFFDNRENMFSEEAKSTSIAFRCINENLTRYISNMDIFEKVDAIFDKHEVQEIKEKILNSDYDVEDFFEGEFFNFVLTQEGIDVYNAIIGGFVTESGEKIKGLNEYINLYNQKTKQKLPKFKPLYKQVLSDRESLSFYGEGYTSDEEVLEVFRNTLNKNSEIFSSIKKLEKLFKNFDEYSSAGIFVKNGPAISTISKDIFGEWNVIRDKWNAEYDDIHLKKKAVVTEKYEDDRRKSFKKIGSFSLEQLQEYADADLSVVEKLKEIIIQKVDEIYKVYGSSEKLFDADFVLEKSLKKNDAVVAIMKDLLDSVKSFENYIKAFFGEGKETNRDESFYGDFVLAYDILLKVDHIYDAIRNYVTQKPYSKDKFKLYFQNPQFMGGWDKDKETDYRATILRYGSKYYLAIMDKKYAKCLQKIDKDDVNGNYEKINYKLLPGPNKMLPKVFFSKKWMAYYNPSEDIQKIYKNGTFKKGDMFNLNDCHKLIDFFKDSISRYPKWSNAYDFNFSETEKYKDIAGFYREVEEQGYKVSFESASKKEVDKLVEEGKLYMFQIYNKDFSDKSHGTPNLHTMYFKLLFDENNHGQIRLSGGAELFMRRASLKKEELVVHPANSPIANKNPDNPKKTTTLSYDVYKDKRFSEDQYLLHIPIAINKCPKNIFKINTEVRVLLKHDDNPYVIGIDRGERNLLYIVVVDGKGNIVEQYSLNEIINNFNGIRIKTDYHSLLDKKEKERFEARQNWTSIENIKELKAGYISQVVHKICELVEKYDAVIALEDLNSGFKNSRVKVEKQVYQKFEKMLIDKLNYMVDKKSNPCATGGALKGYQITNKFESFKSMSTQNGFIFYIPAWLTSKIDPSTGFVNLLKTKYTSIADSKKFISSFDRIMYVPEEDLFEFALDYKNFSRTDADYIKKWKLYSYGNRIRIFRNPKKNNVFDWEEVCLTSAYKELFNKYGINYQQGDIRALLCEQSDKAFYSSFMALMSLMLQMRNSITGRTDVDFLISPVKNSDGIFYDSRNYEAQENAILPKNADANGAYNIARKVLWAIGQFKKAEDEKLDKVKIAISNKEWLEYAQTSVKHGGGGSEAAAKGGGGSMVSKGEEDNMAIIKEFMRFKVHMEGSVNGHEFEIEGEGEGRPYEGTQTAKLKVTKGGPLPFAWDILSPQFMYGSKAYVKHPADIPDYLKLSFPEGFKWERVMNFEDGGVVTVTQDSSLQDGEFIYKVKLRGTNFPSDGPVMQKKTMGWEASSERMYPEDGALKGEIKQRLKLKDGGHYDAEVKTTYKAKKPVQLPGAYNVNIKLDITSHNEDYTIVEQYERAEGRHSTGGMDELYK

SEQ ID NO: 310 - protein, 1228 aa, synthetic construct
  REGION 1..1228: note = SYNTHETIC
MSKLEKFTNCYSLSKTLRFKAIPVGKTQENIDNKRLLVEDEKRAEDYKGVKKLLDRYYLSFINDVLHSIKLKNLNNYISLFRKKTRTEKENKELENLEINLRKEIAKAFKGNEGYKSLFKKDIIETILPEFLDDKDEIALVNSFNGFTTAFTGFFDNRENMFSEEAKSTSIAFRCINENLTRYISNMDIFEKVDAIFDKHEVQEIKEKILNSDYDVEDFFEGEFFNFVLTQEGIDVYNAIIGGFVTESGEKIKGLNEYINLYNQKTKQKLPKFKPLYKQVLSDRESLSFYGEGYTSDEEVLEVFRNTLNKNSEIFSSIKKLEKLFKNFDEYSSAGIFVKNGPAISTISKDIFGEWNVIRDKWNAEYDDIHLKKKAVVTEKYEDDRRKSFKKIGSFSLEQLQEYADADLSVVEKLKEIIIQKVDEIYKVYGSSEKLFDADFVLEKSLKKNDAVVAIMKDLLDSVKSFENYIKAFFGEGKETNRDESFYGDFVLAYDILLKVDHIYDAIRNYVTQKPYSKDKFKLYFQNPQFMGGWDKDKETDYRATILRYGSKYYLAIMDKKYAKCLQKIDKDDVNGNYEKINYKLLPGPNKMLPKVFFSKKWMAYYNPSEDIQKIYKNGTFKKGDMFNLNDCHKLIDFFKDSISRYPKWSNAYDFNFSETEKYKDIAGFYREVEEQGYKVSFESASKKEVDKLVEEGKLYMFQIYNKDFSDKSHGTPNLHTMYFKLLFDENNHGQIRLSGGAELFMRRASLKKEELVVHPANSPIANKNPDNPKKTTTLSYDVYKDKRFSEDQYLLHIPIAINKCPKNIFKINTEVRVLLKHDDNPYVIGIDRGERNLLYIVVVDGKGNIVEQYSLNEIINNFNGIRIKTDYHSLLDKKEKERFEARQNWTSIENIKELKAGYISQVVHKICELVEKYDAVIALEDLNSGFKNSRVKVEKQVYQKFEKMLIDKLNYMVDKKSNPCATGGALKGYQITNKFESFKSMSTQNGFIFYIPAWLTSKIDPSTGFVNLLKTKYTSIADSKKFISSFDRIMYVPEEDLFEFALDYKNFSRTDADYIKKWKLYSYGNRIRIFRNPKKNNVFDWEEVCLTSAYKELFNKYGINYQQGDIRALLCEQSDKAFYSSFMALMSLMLQMRNSITGRTDVDFLISPVKNSDGIFYDSRNYEAQENAILPKNADANGAYNIARKVLWAIGQFKKAEDEKLDKVKIAISNKEWLEYAQTSVKH

SEQ ID NO: 311 - protein, 1607 aa, synthetic construct
  REGION 1..1607: note = SYNTHETIC
MDKKYSIGLDIGTNSVGWAVITDEYKVPSKKFKVLGNTDRHSIKKNLIGALLFDSGETAEATRLKRTARRRYTRRKNRICYLQEIFSNEMAKVDDSFFHRLEESFLVEEDKKHERHPIFGNIVDEVAYHEKYPTIYHLRKKLVDSTDKADLRLIYLALAHMIKFRGHFLIEGDLNPDNSDVDKLFIQLVQTYNQLFEENPINASGVDAKAILSARLSKSRRLENLIAQLPGEKKNGLFGNLIALSLGLTPNFKSNFDLAEDAKLQLSKDTYDDDLDNLLAQIGDQYADLFLAAKNLSDAILLSDILRVNTEITKAPLSASMIKRYDEHHQDLTLLKALVRQQLPEKYKEIFFDQSKNGYAGYIDGGASQEEFYKFIKPILEKMDGTEELLVKLNREDLLRKQRTFDNGSIPHQIHLGELHAILRRQEDFYPFLKDNREKIEKILTFRIPYYVGPLARGNSRFAWMTRKSEETITPWNFEEVVDKGASAQSFIERMTNFDKNLPNEKVLPKHSLLYEYFTVYNELTKVKYVTEGMRKPAFLSGEQKKAIVDLLFKTNRKVTVKQLKEDYFKKIECFDSVEISGVEDRFNASLGTYHDLLKIIKDKDFLDNEENEDILEDIVLTLTLFEDREMIEERLKTYAHLFDDKVMKQLKRRRYTGWGRLSRKLINGIRDKQSGKTILDFLKSDGFANRNFMQLIHDDSLTFKEDIQKAQVSGQGDSLHEHIANLAGSPAIKKGILQTVKVVDELVKVMGRHKPENIVIEMARENQTTQKGQKNSRERMKRIEEGIKELGSQILKEHPVENTQLQNEKLYLYYLQNGRDMYVDQELDINRLSDYDVDHIVPQSFLKDDSIDNKVLTRSDKNRGKSDNVPSEEVVKKMKNYWRQLLNAKLITQRKFDNLTKAERGGLSELDKAGFIKRQLVETRQITKHVAQILDSRMNTKYDENDKLIREVKVITLKSKLVSDFRKDFQFYKVREINNYHHAHDAYLNAVVGTALIKKYPKLESEFVYGDYKVYDVRKMIAKSEQEIGKATAKYFFYSNIMNFFKTEITLANGEIRKRPLIETNGETGEIVWDKGRDFATVRKVLSMPQVNIVKKTEVQTGGFSKESILPKRNSDKLIARKKDWDPKKYGGFDSPTVAYSVLVVAKVEKGKSKKLKSVKELLGITIMERSSFEKNPIDFLEAKGYKEVKKDLIIKLPKYSLFELENGRKRMLASAGELQKGNELALPSKYVNFLYLASHYEKLKGSPEDNEQKQLFVEQHKHYLDEIIEQISEFSKRVILADANLDKVLSAYNKHRDKPIREQAENIIHLFTLTNLGAPAAFKYFDTTIDRKRYTSTKEVLDATLIHQSITGLYETRIDLSQLGGDMVSKGEELFTGVVPILVELDGDVNGHKFSVSGEGEGDATYGKLTLKFICTTGKLPVPWPTLVTTLTYGVQCFSRYPDHMKQHDFFKSAMPEGYVQERTIFFKDDGNYKTRAEVKFEGDTLVNRIELKGIDFKEDGNILGHKLEYNYNSHNVYIMADKQKNGIKVNFKIRHNIEDGSVQLADHYQQNTPIGDGPVLLPDNHYLSTQSALSKDPNEKRDHMVLLEFVTAAGITLGMDELYK

SEQ ID NO: 312 - protein, 1543 aa, synthetic construct
  REGION 1..1543: note = SYNTHETIC
MTQFEGFTNLYQVSKTLRFELIPQGKTLKHIQEQGFIEEDKARNDHYKELKPIIDRIYKTYADQCLQLVQLDWENLSAAIDSYRKEKTEETRNALIEEQATYRNAIHDYFIGRTDNLTDAINKRHAEIYKGLFKAELFNGKVLKQLGTVTTTEHENALLRSFDKFTTYFSGFYENRKNVFSAEDISTAIPHRIVQDNFPKFKENCHIFTRLITAVPSLREHFENVKKAIGIFVSTSIEEVFSFPFYNQLLTQTQIDLYNQLLGGISREAGTEKIKGLNEVLNLAIQKNDETAHIIASLPHRFIPLFKQILSDRNTLSFILEEFKSDEEVIQSFCKYKTLLRNENVLETAEALFNELNSIDLTHIFISHKKLETISSALCDHWDTLRNALYERRISELTGKITKSAKEKVQRSLKHEDINLQEIISAAGKELSEAFKQKTSEILSHAHAALDQPLPTTLKKQEEKEILKSQLDSLLGLYHLLDWFAVDESNEVDPEFSARLTGIKLEMEPSLSFYNKARNYATKKPYSVEKFKLNFQMPTLASGWDVNKEKNNGAILFVKNGLYYLGIMPKQKGRYKALSFEPTEKTSEGFDKMYYDYFPDAAKMIPKCSTQLKAVTAHFQTHTTPILLSNNFIEPLEITKEIYDLNNPEKEPKKFQTAYAKKTGDQKGYREALCKWIDFTRDFLSKYTKTTSIDLSSLRPSSQYKDLGEYYAELNPLLYHISFQRIAEKEIMDAVETGKLYLFQIYNKDFAKGHHGKPNLHTLYWTGLFSPENLAKTSIKLNGQAELFYRPKSRMKRMAHRLGEKMLNKKLKDQKTPIPDTLYQELYDYVNHRLSHDLSDEARALLPNVITKEVSHEIIKDRRFTSDKFFFHVPITLNYQAANSPSKFNQRVNAYLKEHPETPIIGIDRGERNLIYITVIDSTGKILEQRSLNTIQQFDYQKKLDNREKERVAARQAWSVVGTIKDLKQGYLSQVIHEIVDLMIHYQAVVVLENLNFGFKSKRTGIAEKAVYQQFEKMLIDKLNCLVLKDYPAEKVGGVLNPYQLTDQFTSFAKMGTQSGFLFYVPAPYTSKIDPLTGFVDPFVWKTIKNHESRKHFLEGFDFLHYDVKTGDFILHFKMNRNLSFQRGLPGFMPAWDIVFEKNETQFDAKGTPFIAGKRIVPVIENHRFTGRYRDLYPANELIALLEEKGIVFRDGSNILPKLLENDDSHAIDTMVALIRSVLQMRNSNAATGEDYINSPVRDLNGVCFDSRFQNPEWPMDADANGAYHIALKGQLLLNHLKESKDLKLQNGISNQDWLAYIQELRNMVSKGEEDNMAIIKEFMRFKVHMEGSVNGHEFEIEGEGEGRPYEGTQTAKLKVTKGGPLPFAWDILSPQFMYGSKAYVKHPADIPDYLKLSFPEGFKWERVMNFEDGGVVTVTQDSSLQDGEFIYKVKLRGTNFPSDGPVMQKKTMGWEASSERMYPEDGALKGEIKQRLKLKDGGHYDAEVKTTYKAKKPVQLPGAYNVNIKLDITSHNEDYTIVEQYERAEGRHSTGGMDELYK

SEQ ID NO: 313 - protein, 1467 aa, synthetic construct
  REGION 1..1467: note = SYNTHETIC
MSKLEKFTNCYSLSKTLRFKAIPVGKTQENIDNKRLLVEDEKRAEDYKGVKKLLDRYYLSFINDVLHSIKLKNLNNYISLFRKKTRTEKENKELENLEINLRKEIAKAFKGNEGYKSLFKKDIIETILPEFLDDKDEIALVNSFNGFTTAFTGFFDNRENMFSEEAKSTSIAFRCINENLTRYISNMDIFEKVDAIFDKHEVQEIKEKILNSDYDVEDFFEGEFFNFVLTQEGIDVYNAIIGGFVTESGEKIKGLNEYINLYNQKTKQKLPKFKPLYKQVLSDRESLSFYGEGYTSDEEVLEVFRNTLNKNSEIFSSIKKLEKLFKNFDEYSSAGIFVKNGPAISTISKDIFGEWNVIRDKWNAEYDDIHLKKKAVVTEKYEDDRRKSFKKIGSFSLEQLQEYADADLSVVEKLKEIIIQKVDEIYKVYGSSEKLFDADFVLEKSLKKNDAVVAIMKDLLDSVKSFENYIKAFFGEGKETNRDESFYGDFVLAYDILLKVDHIYDAIRNYVTQKPYSKDKFKLYFQNPQFMGGWDKDKETDYRATILRYGSKYYLAIMDKKYAKCLQKIDKDDVNGNYEKINYKLLPGPNKMLPKVFFSKKWMAYYNPSEDIQKIYKNGTFKKGDMFNLNDCHKLIDFFKDSISRYPKWSNAYDFNFSETEKYKDIAGFYREVEEQGYKVSFESASKKEVDKLVEEGKLYMFQIYNKDFSDKSHGTPNLHTMYFKLLFDENNHGQIRLSGGAELFMRRASLKKEELVVHPANSPIANKNPDNPKKTTTLSYDVYKDKRFSEDQYELHIPIAINKCPKNIFKINTEVRVLLKHDDNPYVIGIDRGERNLLYIVVVDGKGNIVEQYSLNEIINNFNGIRIKTDYHSLLDKKEKERFEARQNWTSIENIKELKAGYISQVVHKICELVEKYDAVIALEDLNSGFKNSRVKVEKQVYQKFEKMLIDKLNYMVDKKSNPCATGGALKGYQITNKFESFKSMSTQNGFIFYIPAWLTSKIDPSTGFVNLLKTKYTSIADSKKFISSFDRIMYVPEEDLFEFALDYKNFSRTDADYIKKWKLYSYGNRIRIFRNPKKNNVFDWEEVCLTSAYKELFNKYGINYQQGDIRALLCEQSDKAFYSSFMALMSLMLQMRNSITGRTDVDFLISPVKNSDGIFYDSRNYEAQENAILPKNADANGAYNIARKVLWAIGQFKKAEDEKLDKVKIAISNKEWLEYAQTSVKHMVSKGEELFTGVVPILVELDGDVNGHKFSVSGEGEGDATYGKLTLKFICTTGKLPVPWPTLVTTLTYGVQCFSRYPDHMKQHDFFKSAMPEGYVQERTIFFKDDGNYKTRAEVKFEGDTLVNRIELKGIDFKEDGNILGHKLEYNYNSHNVYIMADKQKNGIKVNFKIRHNIEDGSVQLADHYQQNTPIGDGPVLLPDNHYLSTQSALSKDPNEKRDHMVLLEFVTAAGITLGMDELYK

SEQ ID NO: 314 - protein, 1467 aa, synthetic construct
  REGION 1..1467: note = SYNTHETIC
MSKLEKFTNCYSLSKTLRFKAIPVGKTQENIDNKRLLVEDEKRAEDYKGVKKLLDRYYLSFINDVLHSIKLKNLNNYISLFRKKTRTEKENKELENLEINLRKEIAKAFKGNEGYKSLFKKDIIETILPEFLDDKDEIALVNSFNGFTTAFTGFFDNRENMFSEEAKSTSIAFRCINENLTRYISNMDIFEKVDAIFDKHEVQEIKEKILNSDYDVEDFFEGEFFNFVLTQEGIDVYNAIIGGFVTESGEKIKGLNEYINLYNQKTKQKLPKFKPLYKQVLSDRESLSFYGEGYTSDEEVLEVFRNTLNKNSEIFSSIKKLEKLFKNFDEYSSAGIFVKNGPAISTISKDIFGEWNVIRDKWNAEYDDIHLKKKAVVTEKYEDDRRKSFKKIGSFSLEQLQEYADADLSVVEKLKEIIIQKVDEIYKVYGSSEKLFDADFVLEKSLKKNDAVVAIMKDLLDSVKSFENYIKAFFGEGKETNRDESFYGDFVLAYDILLKVDHIYDAIRNYVTQKPYSKDKFKLYFQNPQFMGGWDKDKETDYRATILRYGSKYYLAIMDKKYAKCLQKIDKDDVNGNYEKINYKLLPGPNKMLPKVFFSKKWMAYYNPSEDIQKIYKNGTFKKGDMFNLNDCHKLIDFFKDSISRYPKWSNAYDFNFSETEKYKDIAGFYREVEEQGYKVSFESASKKEVDKLVEEGKLYMFQIYNKDFSDKSHGTPNLHTMYFKLLFDENNHGQIRLSGGAELFMRRASLKKEELVVHPANSPIANKNPDNPKKTTTLSYDVYKDKRFSEDQYLLHIPIAINKCPKNIFKINTEVRVLLKHDDNPYVIGIDRGERNLLYIVVVDGKGNIVEQYSLNEIINNFNGIRIKTDYHSLLDKKEKERFEARQNWTSIENIKELKAGYISQVVHKICELVEKYDAVIALEDLNSGFKNSRVKVEKQVYQKFEKMLIDKLNYMVDKKSNPCATGGALKGYQITNKFESFKSMSTQNGFIFYIPAWLTSKIDPSTGFVNLLKTKYTSIADSKKFISSFDRIMYVPEEDLFEFALDYKNFSRTDADYIKKWKLYSYGNRIRIFRNPKKNNVFDWEEVCLTSAYKELFNKYGINYQQGDIRALLCEQSDKAFYSSFMALMSLMLQMRNSITGRTDVDFLISPVKNSDGIFYDSRNYEAQENAILPKNADANGAYNIARKVLWAIGQFKKAEDEKLDKVKIAISNKEWLEYAQTSVKHMVSKGEELFTGVVPILVELDGDVNGHKFSVSGEGEGDATYGKLTLKFICTTGKLPVPWPTLVTTLTYGVQCFSRYPDHMKQHDFFKSAMPEGYVQERTIFFKDDGNYKTRAEVKFEGDTLVNRIELKGIDFKEDGNILGHKLEYNYNSHNVYIMADKQKNGIKVNFKIRHNIEDGSVQLADHYQQNTPIGDGPVLLPDNHYLSTQSALSKDPNEKRDHMVLLEFVTAAGITLGMDELYK

SEQ ID NO: 315 - protein, 1604 aa, synthetic construct
  REGION 1..1604: note = SYNTHETIC
MDKKYSIGLDIGTNSVGWAVITDEYKVPSKKFKVLGNTDRHSIKKNLIGALLFDSGETAEATRLKRTARRRYTRRKNRICYLQEIFSNEMAKVDDSFFHRLEESFLVEEDKKHERHPIFGNIVDEVAYHEKYPTIYHLRKKLVDSTDKADLRLIYLALAHMIKFRGHFLIEGDLNPDNSDVDKLFIQLVQTYNQLFEENPINASGVDAKAILSARLSKSRRLENLIAQLPGEKKNGLFGNLIALSLGLTPNFKSNFDLAEDAKLQLSKDTYDDDLDNLLAQIGDQYADLFLAAKNLSDAILLSDILRVNTEITKAPLSASMIKRYDEHHQDLTLLKALVRQQLPEKYKEIFFDQSKNGYAGYIDGGASQEEFYKFIKPILEKMDGTEELLVKLNREDLLRKQRTFDNGSIPHQIHLGELHAILRRQEDFYPFLKDNREKIEKILTFRIPYYVGPLARGNSRFAWMTRKSEETITPWNFEEVVDKGASAQSFIERMTNFDKNLPNEKVLPKHSLLYEYFTVYNELTKVKYVTEGMRKPAFLSGEQKKAIVDLLFKTNRKVTVKQLKEDYFKKIECFDSVEISGVEDRFNASLGTYHDLLKIIKDKDFLDNEENEDILEDIVLTLTLFEDREMIEERLKTYAHLFDDKVMKQLKRRRYTGWGRLSRKLINGIRDKQSGKTILDFLKSDGFANRNFMQLIHDDSLTFKEDIQKAQVSGQGDSLHEHIANLAGSPAIKKGILQTVKVVDELVKVMGRHKPENIVIEMARENQTTQKGQKNSRERMKRIEEGIKELGSQILKEHPVENTQLQNEKLYLYYLQNGRDMYVDQELDINRLSDYDVDHIVPQSFLKDDSIDNKVLTRSDKNRGKSDNVPSEEVVKKMKNYWRQLLNAKLITQRKFDNLTKAERGGLSELDKAGFIKRQLVETRQITKHVAQILDSRMNTKYDENDKLIREVKVITLKSKLVSDFRKDFQFYKVREINNYHHAHDAYLNAVVGTALIKKYPKLESEFVYGDYKVYDVRKMIAKSEQEIGKATAKYFFYSNIMNFFKTEITLANGEIRKRPLIETNGETGEIVWDKGRDFATVRKVLSMPQVNIVKKTEVQTGGFSKESILPKRNSDKLIARKKDWDPKKYGGFDSPTVAYSVLVVAKVEKGKSKKLKSVKELLGITIMERSSFEKNPIDFLEAKGYKEVKKDLIIKLPKYSLFELENGRKRMLASAGELQKGNELALPSKYVNFLYLASHYEKLKGSPEDNEQKQLFVEQHKHYLDEIIEQISEFSKRVILADANLDKVLSAYNKHRDKPIREQAENIIHLFTLTNLGAPAAFKYFDTTIDRKRYTSTKEVLDATLIHQSITGLYETRIDLSQLGGDMVSKGEEDNMAIIKEFMRFKVHMEGSVNGHEFEIEGEGEGRPYEGTQTAKLKVTKGGPLPFAWDILSPQFMYGSKAYVKHPADIPDYLKLSFPEGFKWERVMNFEDGGVVTVTQDSSLQDGEFIYKVKLRGTNFPSDGPVMQKKTMGWEASSERMYPEDGALKGEIKQRLKLKDGGHYDAEVKTTYKAKKPVQLPGAYNVNIKLDITSHNEDYTIVEQYERAEGRHSTGGMDELYK

SEQ ID NO: 316 - protein, 1543 aa, synthetic construct; identical to SEQ ID NO: 312
  REGION 1..1543: note = SYNTHETIC

SEQ ID NO: 317 - protein, 1464 aa, synthetic construct
  REGION 1..1464: note = SYNTHETIC
MSKLEKFTNCYSLSKTLRFKAIPVGKTQENIDNKRLLVEDEKRAEDYKGVKKLLDRYYLSFINDVLHSIKLKNLNNYISLFRKKTRTEKENKELENLEINLRKEIAKAFKGNEGYKSLFKKDIIETILPEFLDDKDEIALVNSFNGFTTAFTGFFDNRENMFSEEAKSTSIAFRCINENLTRYISNMDIFEKVDAIFDKHEVQEIKEKILNSDYDVEDFFEGEFFNFVLTQEGIDVYNAIIGGFVTESGEKIKGLNEYINLYNQKTKQKLPKFKPLYKQVLSDRESLSFYGEGYTSDEEVLEVFRNTLNKNSEIFSSIKKLEKLFKNFDEYSSAGIFVKNGPAISTISKDIFGEWNVIRDKWNAEYDDIHLKKKAVVTEKYEDDRRKSFKKIGSFSLEQLQEYADADLSVVEKLKEIIIQKVDEIYKVYGSSEKLFDADFVLEKSLKKNDAVVAIMKDLLDSVKSFENYIKAFFGEGKETNRDESFYGDFVLAYDILLKVDHIYDAIRNYVTQKPYSKDKFKLYFQNPQFMGGWDKDKETDYRATILRYGSKYYLAIMDKKYAKCLQKIDKDDVNGNYEKINYKLLPGPNKMLPKVFFSKKWMAYYNPSEDIQKIYKNGTFKKGDMFNLNDCHKLIDFFKDSISRYPKWSNAYDFNFSETEKYKDIAGFYREVEEQGYKVSFESASKKEVDKLVEEGKLYMFQIYNKDFSDKSHGTPNLHTMYFKLLFDENNHGQIRLSGGAELFMRRASLKKEELVVHPANSPIANKNPDNPKKTTTLSYDVYKDKRFSEDQYELHIPIAINKCPKNIFKINTEVRVLLKHDDNPYVIGIDRGERNLLYIVVVDGKGNIVEQYSLNEIINNFNGIRIKTDYHSLLDKKEKERFEARQNWTSIENIKELKAGYISQVVHKICELVEKYDAVIALEDLNSGFKNSRVKVEKQVYQKFEKMLIDKLNYMVDKKSNPCATGGALKGYQITNKFESFKSMSTQNGFIFYIPAWLTSKIDPSTGFVNLLKTKYTSIADSKKFISSFDRIMYVPEEDLFEFALDYKNFSRTDADYIKKWKLYSYGNRIRIFRNPKKNNVFDWEEVCLTSAYKELFNKYGINYQQGDIRALLCEQSDKAFYSSFMALMSLMLQMRNSITGRTDVDFLISPVKNSDGIFYDSRNYEAQENAILPKNADANGAYNIARKVLWAIGQFKKAEDEKLDKVKIAISNKEWLEYAQTSVKHMVSKGEEDNMAIIKEFMRFKVHMEGSVNGHEFEIEGEGEGRPYEGTQTAKLKVTKGGPLPFAWDILSPQFMYGSKAYVKHPADIPDYLKLSFPEGFKWERVMNFEDGGVVTVTQDSSLQDGEFIYKVKLRGTNFPSDGPVMQKKTMGWEASSERMYPEDGALKGEIKQRLKLKDGGHYDAEVKTTYKAKKPVQLPGAYNVNIKLDITSHNEDYTIVEQYERAEGRHSTGGMDELYK

SEQ ID NO: 318 - protein, 1464 aa, synthetic construct
  REGION 1..1464: note = SYNTHETIC
MSKLEKFTNCYSLSKTLRFKAIPVGKTQENIDNKRLLVEDEKRAEDYKGVKKLLDRYYLSFINDVLHSIKLKNLNNYISLFRKKTRTEKENKELENLEINLRKEIAKAFKGNEGYKSLFKKDIIETILPEFLDDKDEIALVNSFNGFTTAFTGFFDNRENMFSEEAKSTSIAFRCINENLTRYISNMDIFEKVDAIFDKHEVQEIKEKILNSDYDVEDFFEGEFFNFVLTQEGIDVYNAIIGGFVTESGEKIKGLNEYINLYNQKTKQKLPKFKPLYKQVLSDRESLSFYGEGYTSDEEVLEVFRNTLNKNSEIFSSIKKLEKLFKNFDEYSSAGIFVKNGPAISTISKDIFGEWNVIRDKWNAEYDDIHLKKKAVVTEKYEDDRRKSFKKIGSFSLEQLQEYADADLSVVEKLKEIIIQKVDEIYKVYGSSEKLFDADFVLEKSLKKNDAVVAIMKDLLDSVKSFENYIKAFFGEGKETNRDESFYGDFVLAYDILLKVDHIYDAIRNYVTQKPYSKDKFKLYFQNPQFMGGWDKDKETDYRATILRYGSKYYLAIMDKKYAKCLQKIDKDDVNGNYEKINYKLLPGPNKMLPKVFFSKKWMAYYNPSEDIQKIYKNGTFKKGDMFNLNDCHKLIDFFKDSISRYPKWSNAYDFNFSETEKYKDIAGFYREVEEQGYKVSFESASKKEVDKLVEEGKLYMFQIYNKDFSDKSHGTPNLHTMYFKLLFDENNHGQIRLSGGAELFMRRASLKKEELVVHPANSPIANKNPDNPKKTTTLSYDVYKDKRFSEDQYLLHIPIAINKCPKNIFKINTEVRVLLKHDDNPYVIGIDRGERNLLYIVVVDGKGNIVEQYSLNEIINNFNGIRIKTDYHSLLDKKEKERFEARQNWTSIENIKELKAGYISQVVHKICELVEKYDAVIALEDLNSGFKNSRVKVEKQVYQKFEKMLIDKLNYMVDKKSNPCATGGALKGYQITNKFESFKSMSTQNGFIFYIPAWLTSKIDPSTGFVNLLKTKYTSIADSKKFISSFDRIMYVPEEDLFEFALDYKNFSRTDADYIKKWKLYSYGNRIRIFRNPKKNNVFDWEEVCLTSAYKELFNKYGINYQQGDIRALLCEQSDKAFYSSFMALMSLMLQMRNSITGRTDVDFLISPVKNSDGIFYDSRNYEAQENAILPKNADANGAYNIARKVLWAIGQFKKAEDEKLDKVKIAISNKEWLEYAQTSVKHMVSKGEEDNMAIIKEFMRFKVHMEGSVNGHEFEIEGEGEGRPYEGTQTAKLKVTKGGPLPFAWDILSPQFMYGSKAYVKHPADIPDYLKLSFPEGFKWERVMNFEDGGVVTVTQDSSLQDGEFIYKVKLRGTNFPSDGPVMQKKTMGWEASSERMYPEDGALKGEIKQRLKLKDGGHYDAEVKTTYKAKKPVQLPGAYNVNIKLDITSHNEDYTIVEQYERAEGRHSTGGMDELYK

SEQ ID NO: 319 - RNA, 36 nt, synthetic construct
  misc_feature 1..36: note = SYNTHETIC
  source 1..36: mol_type = other RNA
tccatttcatagtctttcctgttttagagctatgct

SEQ ID NO: 320 - RNA, 36 nt, synthetic construct
  misc_feature 1..36: note = SYNTHETIC
  source 1..36: mol_type = other RNA
ttttgtaattaacagcttgcgttttagagctatgct

SEQ ID NO: 321 - RNA, 36 nt, synthetic construct
  misc_feature 1..36: note = SYNTHETIC
  source 1..36: mol_type = other RNA
cttagagaatatttgtagaggttttagagctatgct

SEQ ID NO: 322 - RNA, 36 nt, synthetic construct
  misc_feature 1..36: note = SYNTHETIC
  source 1..36: mol_type = other RNA
ttgactataatgaatacttcgttttagagctatgct

SEQ ID NO: 323 - RNA, 36 nt, synthetic construct
  misc_feature 1..36: note = SYNTHETIC
  source 1..36: mol_type = other RNA
caaaacacagcataaaatttgttttagagctatgct

SEQ ID NO: 324 - RNA, 36 nt, synthetic construct
  misc_feature 1..36: note = SYNTHETIC
  source 1..36: mol_type = other RNA
aattatggggattactaggagttttagagctatgct

SEQ ID NO: 325 - RNA, 36 nt, synthetic construct
  misc_feature 1..36: note = SYNTHETIC
  source 1..36: mol_type = other RNA
ggtcacttttaacacacccagttttagagctatgct

SEQ ID NO: 326 - RNA, 36 nt, synthetic construct
  misc_feature 1..36: note = SYNTHETIC
  source 1..36: mol_type = other RNA
cttatatccaacacttcgtggttttagagctatgct

SEQ ID NO: 327 - RNA, 36 nt, synthetic construct
  misc_feature 1..36: note = SYNTHETIC
  source 1..36: mol_type = other RNA
ggcttatatccaacacttcggttttagagctatgct

SEQ ID NO: 328 - RNA, 36 nt, synthetic construct
  misc_feature 1..36: note = SYNTHETIC
  source 1..36: mol_type = other RNA
atttcacataaaactcttttgttttagagctatgct

SEQ ID NO: 329 - RNA, 36 nt, synthetic construct
  misc_feature 1..36: note = SYNTHETIC
  source 1..36: mol_type = other RNA
tcaaattatgaggtgctggagttttagagctatgct

SEQ ID NO: 330 - RNA, 36 nt, synthetic construct
  misc_feature 1..36: note = SYNTHETIC
  source 1..36: mol_type = other RNA
tacagctttatgtgactaatgttttagagctatgct

SEQ ID NO: 331 - DNA, 27 bp, synthetic construct
  misc_feature 1..27: note = SYNTHETIC
  source 1..27: mol_type = other DNA
aagaatgttgtgataaaaggtgatgct

SEQ ID NO: 332 - DNA, 24 bp, synthetic construct
  misc_feature 1..24: note = SYNTHETIC
  source 1..24: mol_type = other DNA
acacatccatgggacttctgcctc

SEQ ID NO: 333 - DNA, 21 bp, synthetic construct
  misc_feature 1..21: note = SYNTHETIC
  source 1..21: mol_type = other DNA
acacacccaaggaaagactat

SEQ ID NO: 334 - DNA, 21 bp, synthetic construct
  misc_feature 1..21: note = SYNTHETIC
  source 1..21: mol_type = other DNA
taatgccctgtagtctctctg

SEQ ID NO: 335 - DNA, 21 bp, synthetic construct
  misc_feature 1..21: note = SYNTHETIC
  source 1..21: mol_type = other DNA
ggttaaagatggttaaatgat

SEQ ID NO: 336 - DNA, 21 bp, synthetic construct
  misc_feature 1..21: note = SYNTHETIC
  source 1..21: mol_type = other DNA
ttgtaggatatgcccttgact

SEQ ID NO: 337 - DNA, 4251 bp, synthetic construct
  misc_feature 1..4251: note = SYNTHETIC
  source 1..4251: mol_type = other DNA
atgggcagcagcgccccaaagaagaagcggaaggtcggtatccacggagtcccagcagccatggacaaaaagtactctattggcctggatatcgggaccaacagcgtcgggtgggctgttatcaccgacgagtataaagtaccttcgaaaaagttcaaagtgctgggcaacaccgatcgccattcaatcaaaaagaacttgattggtgcgctgttgtttgactccggggaaaccgccgaggcgactcgccttaaacgtacagcacgtcgccggtacactcggcgtaagaatcgcatttgctatttgcaggaaatctttagcaacgagatggcaaaagtcgatgactcgtttttccaccgcctcgaggaaagctttctggtggaggaagacaaaaagcatgagcgtcacccgatcttcggcaacattgtcgatgaagtagcgtatcatgaaaaatacccaaccatttaccacttacgcaaaaagctggtggacagcactgacaaagctgatttgcgccttatctatttagccctggcacatatgattaagtttcgtggtcacttcctgatcgaaggagacttaaatcccgacaacagtgatgttgataaattgtttattcagcttgtccaaacttacaatcaactgttcgaggaaaacccgatcaatgcctccggtgtggatgcaaaagccattttaagtgcacgccttagcaagtcccgtcgcttagaaaaccttatcgcgcagctgcccggcgagaaaaagaatggtttgtttgggaaccttattgccttgagcttaggcctcaccccgaatttcaaaagtaatttcgatcttgcagaagacgccaaattacaactgtcgaaggatacttatgatgacgatctcgataatctgttagcgcagattggtgaccaatacgccgatctttttctggcggctaaaaatctgagcgacgccatcttgctttcggatattctccgcgttaacaccgaaatcacgaaagcgcctcttagtgccagcatgattaaacgttatgatgaacaccaccaggacctgaccttactcaaagcgttggttcgccagcaactgccagagaagtacaaagaaatcttctttgatcagtcaaagaatggttatgccggctatattgacgggggtgcaagccaagaggaattctacaaatttatcaagcctattctggagaaaatggatggcaccgaagagttattggtgaagcttaaccgtgaagacctcctgcggaaacagcgcacattcgataatggttcgatcccacaccaaatccatttgggggagttacacgctattttgcgtcgccaggaagacttttaccctttcctgaaggataaccgggagaaaattgagaagatccttacctttcgtattccgtattacgtaggccccttagcacggggtaatagccgtttcgcgtggatgacacggaagtcggaagagacgatcaccccgtggaacttcgaagaggtagtcgacaagggcgcatcagcgcagtcttttattgaacgtatgacgaatttcgataaaaacttgcccaatgagaaggtgcttccgaaacattccttgttatatgaatattttacagtttacaacgagctgaccaaggttaaatacgtgacggaaggaatgcgcaagcccgcttttcttagcggtgagcaaaaaaaggcgatcgtcgacctgttattcaaaacgaatcgtaaggtgactgtaaagcaactcaaagaagattacttcaaaaagattgagtgcttcgacagcgtcgaaatctctggggtagaggatcggtttaacgcaagtttaggtacctaccatgacctgcttaaaatcattaaggataaagacttcttagataatgaagagaacgaagatattctcgaggacatcgtcttgacgttaaccttatttgaggatcgtgaaatgattgaggaacgcctcaaaacttatgcccacctgttcgacgataaggtgatgaagcagctgaaacgtcggcgctacacaggatggggccgcttgagtcgcaaacttattaacggaatccgtgacaagcaatccggcaaaacgattctggatttcttgaagtcggacggatttgctaatcgcaacttcatgcagttgatccatgatgactccctgacttttaaagaggatattcaaaaggcgcaggttagtggtcaaggcgacagcttacacgaacacatcgcaaatttggctggttcgccggccattaaaaaggggatcctccagaccgtgaaagttgtagatgagcttgttaaggtcatgggtcgtcataagcccgaaaacatcgtgattgaaatggcgcgggagaatcaaacgacccagaaaggacaaaagaatagccgtgaacggatgaagcggatcgaggaaggcattaaagagctggggtctcaaatcttgaaggaacaccctgtggagaacactcagctccaaaatgaaaaactttacctgtactatttgcagaacggacgcgatatgtacgtggaccaagagttggatattaatcggctgagtgactacgacgttgatcatatcgtcccgcagagcttcctcaaagacgattctattgacaataaggtactgacgcgctctgataaaaaccgtggtaagtcggacaacgtgccctccgaagaggttgtgaaaaagatgaaaaattattggcgccagcttttaaacgcgaagctgatcacacaacgtaaattcgataatttgaccaaggctgaacggggtggcctgagcgagttagataaggcaggatttattaaacgccagttagtggagactcgtcaaatcaccaaacatgtcgcgcagattttggacagccggatgaacaccaagtacgatgaaaatgacaaactgatccgtgaggtgaaagtcattactctgaagtccaaattagttagtgatttccggaaggactttcaattctacaaagtccgtgaaattaataactatcatcacgcacatgacgcgtacctgaatgcagtggttgggaccgcccttatcaagaaatatcctaagctggagtcggagtttgtctatggcgactataaggtatacgatgttcgcaaaatgattgcgaaatctgagcaggagatcggtaaggcaaccgcaaaatatttcttttactcaaacattatgaatttctttaagacagaaatcactctggccaacggggagattcgcaaacgtccgttgatcgaaacaaacggcgagactggcgaaattgtttgggacaaagggcgtgatttcgcgacggtgcgcaaggtactgagcatgcctcaagtcaatattgttaagaaaaccgaagtgcagacgggcgggttttccaaggaaagcatcttacccaaacgtaattcagataaacttattgcacgcaaaaaggactgggatccgaaaaagtatggaggcttcgacagtccaaccgtagcctactctgttctcgttgtagcgaaagtagaaaagggtaaatccaagaaactgaaatctgtcaaggagttgcttggaatcaccattatggagcgtagctccttcgagaagaacccgattgactttctggaagccaaaggatataaagaggtcaagaaagatcttatcattaagctgcctaagtattcactcttcgagctggaaaatggtcgtaaacgcatgctcgcttctgccggcgagttgcagaagggcaatgaattagcacttccatcaaagtacgttaacttcctgtatttggccagccattacgagaaactgaaggggtctccagaggacaacgaacagaaacaattatttgtagagcagcacaagcattatcttgatgaaatcattgagcaaatttccgaattcagtaaacgcgtaatcctggccgatgcaaacctcgacaaggtgctgagcgcttacaataagcatcgcgacaaacctatccgtgagcaggctgaaaatatcattcacctgttcacattaacgaacctgggcgctccggccgcttttaaatatttcgacacgacaatcgaccgtaagcgctataccagtacgaaagaagtgttggatgcgacccttattcaccagtcaattacaggattatatgagacccgtatcgaccttagccaattaggtggggatgcggccccgaagaaaaaacgcaaagtggatccgaagaaaaaacgcaaagtggcggccgcactcgagcaccaccaccaccaccactga

SEQ ID NO: 338 - DNA, 4290 bp, synthetic construct
  misc_feature 1..4290: note = SYNTHETIC
  source 1..4290: mol_type = other DNA
atgggcaagcccatccctaaccccctgttggggctggacagcaccgctcccaaaaagaaaaggaaggtgggcattcacggcgtgcctgcggccgacaaaaagtacagcatcggccttgatatcggcaccaatagcgtgggctgggccgttatcacagacgaatacaaggtacccagcaagaagttcaaggtgctggggaatacagacaggcactctatcaagaaaaaccttatcggggctctgctgtttgactcaggcgagaccgccgaggccaccaggttgaagaggaccgcaaggcgaaggtacacccggaggaagaacaggatctgctatctgcaggagatcttcagcaacgagatggccaaggtggacgacagcttcttccacaggctggaggagagcttccttgtcgaggaggataagaagcacgaacgacaccccatcttcggcaacatagtcgacgaggtcgcttatcacgagaagtaccccaccatctaccacctgcgaaagaaattggtggatagcaccgataaagccgacttgcgacttatctacttggctctggcgcacatgattaagttcaggggccacttcctgatcgagggcgaccttaaccccgacaacagtgacgtagacaaattgttcatccagcttgtacagacctataaccagctgttcgaggaaaaccctattaacgccagcggggtggatgcgaaggccatacttagcgccaggctgagcaaaagcaggcgcttggagaacctgatagcccagctgcccggtgaaaagaagaacggcctcttcggtaatctgattgccctgagcctgggcctgacccccaacttcaagagcaacttcgacctggcagaagatgccaagctgcagttgagtaaggacacctatgacgacgacttggacaatctgctcgcccaaatcggcgaccagtacgctgacctgttcctcgccgccaagaacctttctgacgcaatcctgcttagcgatatccttagggtgaacacagagatcaccaaggcccccctgagcgccagcatgatcaagaggtacgacgagcaccatcaggacctgacccttctgaaggccctggtgaggcagcaactgcccgagaagtacaaggagatctttttcgaccagagcaagaacggctacgccggctacatcgacggcggagccagccaagaggagttctacaagttcatcaagcccatcctggagaagatggatggcaccgaggagctgctggtgaagctgaacagggaagatttgctccggaagcagaggacctttgacaacggtagcatcccccaccagatccacctgggcgagctgcacgcaatactgaggcgacaggaggatttctaccccttcctcaaggacaatagggagaaaatcgaaaagattctgaccttcaggatcccctactacgtgggccctcttgccaggggcaacagccgattcgcttggatgacaagaaagagcgaggagaccatcaccccctggaacttcgaggaagtggtggacaaaggagcaagcgcgcagtctttcatcgaacggatgaccaatttcgacaaaaacctgcctaacgagaaggtgctgcccaagcacagcctgctttacgagtacttcaccgtgtacaacgagctcaccaaggtgaaatatgtgaccgagggcatgcgaaaacccgctttcctgagcggcgagcagaagaaggccatcgtggacctgctgttcaagaccaacaggaaggtgaccgtgaagcagctgaaggaggactacttcaagaagatcgagtgctttgatagcgtggaaataagcggcgtggaggacaggttcaacgccagcctgggcacctaccacgacttgttgaagataatcaaagacaaggatttcctggataatgaggagaacgaggatatactcgaggacatcgtgctgactttgaccctgtttgaggaccgagagatgattgaagaaaggctcaaaacctacgcccacctgttcgacgacaaagtgatgaaacaactgaagagacgaagatacaccggctggggcagactgtccaggaagctcatcaacggcattagggacaagcagagcggcaagaccatcctggatttcctgaagtccgacggcttcgccaaccgaaacttcatgcagctgattcacgatgacagcttgaccttcaaggaggacatccagaaggcccaggttagcggccagggcgactccctgcacgaacatattgcaaacctggcaggctcccctgcgatcaagaagggcatactgcagaccgttaaggttgtggacgaattggtcaaggtcatgggcaggcacaagcccgaaaacatagttatagagatggccagagagaaccagaccacccaaaagggccagaagaacagccgggagcgcatgaaaaggatcgaggagggtatcaaggaactcggaagccagatcctcaaagagcaccccgtggagaatacccagctccagaacgagaagctgtacctgtactacctgcagaacggcagggacatgtacgttgaccaggagttggacatcaacaggctttcagactatgacgtggatcacatagtgccccagagctttcttaaagacgatagcatcgacaacaaggtcctgacccgctccgacaaaaacaggggcaaaagcgacaacgtgccaagcgaagaggtggttaaaaagatgaagaactactggaggcaactgctcaacgcgaaattgatcacccagagaaagttcgataacctgaccaaggccgagaggggcggactctccgaacttgacaaagcgggcttcataaagaggcagctggtcgagacccgacagatcacgaagcacgtggcccaaatcctcgacagcagaatgaataccaagtacgatgagaatgacaaactcatcagggaagtgaaagtgattaccctgaagagcaagttggtgtccgactttcgcaaagatttccagttctacaaggtgagggagatcaacaactaccaccatgcccacgacgcatacctgaacgccgtggtcggcaccgccctgattaagaagtatccaaagctggagtccgaatttgtctacggcgactacaaagtttacgatgtgaggaagatgatcgctaagagcgaacaggagatcggcaaggccaccgctaagtatttcttctacagcaacatcatgaactttttcaagaccgagatcacacttgccaacggcgaaatcaggaagaggccgcttatcgagaccaacggtgagaccggcgagatcgtgtgggacaagggcagggacttcgccaccgtgaggaaagtcctgagcatgccccaggtgaatattgtgaaaaaaactgaggtgcagacaggcggctttagcaaggaatccatcctgcccaagaggaacagcgacaagctgatcgcccggaagaaggactgggaccctaagaagtatggaggcttcgacagccccaccgtagcctacagcgtgctggtggtcgcgaaggtagagaaggggaagagcaagaaactgaagagcgtgaaggagctgctcggcataaccatcatggagaggtccagctttgagaagaaccccattgactttttggaagccaagggctacaaagaggtcaaaaaggacctgatcatcaaactccccaagtactccctgtttgaattggagaacggcagaaagaggatgctggcgagcgctggggaactgcaaaagggcaacgaactggcgctgcccagcaagtacgtgaattttctgtacctggcgtcccactacgaaaagctgaaaggcagccccgaggacaacgagcagaagcagctgttcgtggagcagcacaagcattacctggacgagataatcgagcaaatcagcgagttcagcaagagggtgattctggccgacgcgaacctggataaggtcctcagcgcctacaacaagcaccgagacaaacccatcagggagcaggccgagaatatcatacacctgttcaccctgacaaatctgggcgcacctgcggcattcaaatacttcgataccaccatcgacaggaaaaggtacactagcactaaggaggtgctggatgccaccttgatccaccagtccattaccggcctgtatgagaccaggatcgacctgagccagcttggaggcgactctagggcggacccaaaaaagaaaaggaaggtggaattccaccacactggactagtggatccgagctcggtaccaagcttaagtttaaaccgctga

SEQ ID NO: 339 - DNA, 3921 bp, synthetic construct
  misc_feature 1..3921: note = SYNTHETIC
  source 1..3921: mol_type = other DNA
atgacccagtttgaaggtttcaccaatctgtatcaggttagcaaaaccctgcgttttgaactgattccgcagggtaaaaccctgaaacatattcaagaacagggcttcatcgaagaggataaagcacgtaacgatcactacaaagaactgaaaccgattatcgaccgcatctataaaacctatgcagatcagtgtctgcagctggttcagctggattgggaaaatctgagcgcagcaattgatagttatcgcaaagaaaaaaccgaagaaacccgtaatgcactgattgaagaacaggcaacctatcgtaatgccatccatgattatttcattggtcgtaccgataatctgaccgatgcaattaacaaacgtcacgccgaaatctataaaggcctgtttaaagccgaactgtttaatggcaaagttctgaaacagctgggcaccgttaccaccaccgaacatgaaaatgcactgctgcgtagctttgataaattcaccacctatttcagcggcttttatgagaatcgcaaaaacgtgtttagcgcagaagatattagcaccgcaattccgcatcgtattgtgcaggataatttcccgaaattcaaagagaactgccacatttttacccgtctgattaccgcagttccgagcctgcgtgaacattttgaaaacgttaaaaaagccatcggcatctttgttagcaccagcattgaagaagtttttagcttcccgttttacaatcagctgctgacccagacccagattgatctgtataaccaactgctgggtggtattagccgtgaagcaggcaccgaaaaaatcaaaggtctgaatgaagtgctgaatctggccattcagaaaaatgatgaaaccgcacatattattgcaagcctgccgcatcgttttattccgctgttcaaacaaattctgagcgatcgtaataccctgagctttattctggaagaattcaaatccgatgaagaggtgattcagagcttttgcaaatacaaaacgctgctgcgcaatgaaaatgttctggaaactgccgaagcactgtttaacgaactgaatagcattgatctgacccacatctttatcagccacaaaaaactggaaaccatttcaagcgcactgtgtgatcattgggataccctgcgtaatgccctgtatgaacgtcgtattagcgaactgaccggtaaaattaccaaaagcgcgaaagaaaaagttcagcgcagtctgaaacatgaggatattaatctgcaagagattattagcgcagccggtaaagaactgtcagaagcatttaaacagaaaaccagcgaaattctgtcacatgcacatgcagcactggatcagccgctgccgaccaccctgaaaaaacaagaagaaaaagaaatcctgaaaagccagctggatagcctgctgggtctgtatcatctgctggactggtttgcagttgatgaaagcaatgaagttgatccggaatttagcgcacgtctgaccggcattaaactggaaatggaaccgagcctgagcttttataacaaagcccgtaattatgccaccaaaaaaccgtatagcgtcgaaaaattcaaactgaactttcagatgccgaccctggcaagcggttgggatgttaataaagaaaaaaacaacggtgccatcctgttcgtgaaaaatggcctgtattatctgggtattatgccgaaacagaaaggtcgttataaagcgctgagctttgaaccgacggaaaaaaccagtgaaggttttgataaaatgtactacgactattttccggatgcagccaaaatgattccgaaatgtagcacccagctgaaagcagttaccgcacattttcagacccataccaccccgattctgctgagcaataactttattgaaccgctggaaatcaccaaagagatctacgatctgaataacccggaaaaagagccgaaaaaattccagaccgcatatgcaaaaaaaaccggtgatcagaaaggttatcgtgaagcgctgtgtaaatggattgatttcacccgtgattttctgagcaaatacaccaaaaccaccagtatcgatctgagcagcctgcgtccgagcagccagtataaagatctgggcgaatattatgcagaactgaatccgctgctgtatcatattagctttcagcgtattgccgagaaagaaatcatggacgcagttgaaaccggtaaactgtacctgttccagatctacaataaagattttgccaaaggccatcatggcaaaccgaatctgcataccctgtattggaccggtctgtttagccctgaaaatctggcaaaaacctcgattaaactgaatggtcaggcggaactgttttatcgtccgaaaagccgtatgaaacgtatggcacatcgtctgggtgaaaaaatgctgaacaaaaaactgaaagaccagaaaaccccgatcccggatacactgtatcaagaactgtatgattatgtgaaccatcgtctgagccatgatctgagtgatgaagcacgtgccctgctgccgaatgttattaccaaagaagttagccacgagatcattaaagatcgtcgttttaccagcgacaaattcttttttcatgtgccgattaccctgaattatcaggcagcaaatagcccgagcaaatttaaccagcgtgttaatgcatatctgaaagaacatccagaaacgccgattattggtattgatcgtggtgaacgtaacctgatttatatcaccgttattgatagcaccggcaaaatcctggaacagcgtagcctgaataccattcagcagtttgattaccagaaaaaactggataatcgcgagaaagaacgtgttgcagcacgtcaggcatggtcagttgttggtacaattaaagacctgaaacagggttatctgagccaggttattcatgaaattgtggatctgatgattcactatcaggccgttgttgtgctggaaaacctgaattttggctttaaaagcaaacgtaccggcattgcagaaaaagcagtttatcagcagttcgagaaaatgctgattgacaaactgaattgcctggtgctgaaagattatccggctgaaaaagttggtggtgttctgaatccgtatcagctgaccgatcagtttaccagctttgcaaaaatgggcacccagagcggatttctgttttatgttccggcaccgtatacgagcaaaattgatccgctgaccggttttgttgatccgtttgtttggaaaaccatcaaaaaccatgaaagccgcaaacattttctggaaggtttcgattttctgcattacgacgttaaaacgggtgatttcatcctgcactttaaaatgaatcgcaatctgagttttcagcgtggcctgcctggttttatgcctgcatgggatattgtgtttgagaaaaacgaaacacagttcgatgcaaaaggcaccccgtttattgcaggtaaacgtattgttccggtgattgaaaatcatcgtttcaccggtcgttatcgcgatctgtatccggcaaatgaactgatcgcactgctggaagagaaaggtattgtttttcgtgatggctcaaacattctgccgaaactgctggaaaatgatgatagccatgcaattgataccatggttgcactgattcgtagcgttctgcagatgcgtaatagcaatgcagcaaccggtgaagattacattaatagtccggttcgtgatctgaatggtgtttgttttgatagccgttttcagaatccggaatggccgatggatgcagatgcaaatggtgcatatcatattgcactgaaaggacagctgctgctgaaccacctgaaagaaagcaaagatctgaaactgcaaaacggcattagcaatcaggattggctggcatatatccaagaactgcgtaac

SEQ ID NO: 340 - DNA, 3921 bp, synthetic construct; identical to SEQ ID NO: 339
  misc_feature 1..3921: note = SYNTHETIC
  source 1..3921: mol_type = other DNA

SEQ ID NO: 341 - DNA, 3684 bp, synthetic construct
  misc_feature 1..3684: note = SYNTHETIC
  source 1..3684: mol_type = other DNA
atgagtaagctggagaaatttactaattgttactcactgtcaaaaacgctgcgtttcaaagcgatcccagtgggcaaaactcaagaaaatattgacaataaacgtttgcttgtcgaagacgaaaagcgcgccgaagactataagggggtgaagaagcttcttgaccgttactacctttcattcatcaacgatgttctgcacagcatcaagttaaaaaaccttaacaattacattagtttgtttcgcaagaagacacgtacagagaaagagaataaagagcttgaaaacttagagattaaccttcgcaaggagatcgcaaaggcgttcaaaggcaatgaaggctataagtcgttatttaaaaaagacatcattgaaacgattctgcccgagtttttggatgataaggatgaaatcgccttagttaattcgttcaatgggttcactacagcctttacaggattctttgataaccgtgaaaacatgtttagcgaggaagcaaaaagcacgagcattgcatttcgctgcattaacgaaaatttgactcgttatatctctaacatggacatctttgagaaggttgacgcgatcttcgataagcacgaagtccaggagatcaaggagaagattctgaacagcgattacgacgttgaagactttttcgagggggaattttttaactttgtgcttacgcaggaaggaatcgatgtatataatgcaattattggtggcttcgtgacagagtcaggtgagaagattaaaggattaaatgaatatatcaatttatacaatcagaagaccaagcagaagcttcccaagttcaagccactgtacaagcaagtgttgtccgaccgcgagagcctttccttttacggtgaaggctataccagtgacgaagaggtgttagaagtcttccgtaacacgttaaacaaaaattccgaaattttctcatccatcaaaaagctggagaaattatttaagaacttcgacgaatacagtagtgcagggatttttgtgaaaaatggaccagctatcagtactatttctaaagacatcttcggggaatggaatgtgattcgcgataagtggaatgctgagtatgatgatattcatctgaagaagaaggctgtcgtaacggagaagtatgaggacgatcgccgtaagtcattcaaaaaaattggctccttcagccttgagcagctgcaggagtatgctgatgctgatctgtcggttgtcgagaagttaaaagagattattatccaaaaggtagacgaaatttataaggtctacgggagtagcgaaaagttgtttgatgctgacttcgttttagaaaaaagtttgaagaagaatgatgcggtcgttgccattatgaaagatttgctggatagtgttaaatctttcgagaattacatcaaagccttttttggtgaagggaaagagactaatcgcgacgagtctttctacggagattttgtgttagcgtacgatatcctgttgaaggtagaccacatctatgacgctattcgcaattatgtcacacaaaaaccatattctaaggacaagttcaaattgtactttcagaacccccaattcatgggcggatgggacaaggataaggaaacagactaccgtgcgacgattttgcgctacggtagcaaatactacctggctatcatggacaaaaagtacgcaaaatgtttacagaaaattgacaaggatgacgtcaacggtaactatgaaaaaatcaattacaaattactgcctgggccaaataagatgctgccaaaagtgttctttagtaagaaatggatggcctactataatccgtctgaggacatccaaaaaatctacaaaaacggcacgttcaagaagggagatatgttcaatttaaacgattgtcacaaattaatcgatttttttaaagattccatttcccgttatccaaagtggtccaatgcatatgacttcaactttagcgagaccgagaaatacaaggatatcgccggattctatcgtgaggtggaggaacaaggttacaaggtctcctttgagtcagcctctaaaaaggaggttgataaattggtggaggagggcaaattgtatatgttccaaatttacaacaaagacttctctgacaagagtcatggcactcctaacttgcacactatgtatttcaaattgttatttgatgaaaataatcatggtcaaatccgtttgtcaggcggtgcagaattgttcatgcgtcgcgctagcttaaagaaggaggagttagtagtacacccggctaacagtccgatcgctaacaaaaacccggacaatcccaaaaaaacaactacgctgagttacgacgtgtataaagataaacgcttctcagaggaccaatatgaactgcatatccccatcgccatcaataagtgccccaagaacattttcaagatcaatacggaagtacgcgtcctgttgaagcacgatgataacccgtacgtcattggtatcgaccgcggtgaacgcaatttactttatatcgtcgtagtggacggtaaaggcaacattgtagagcaatattccttaaacgagatcatcaataattttaacggcatccgcattaaaacagattaccactctctgctggataaaaaagagaaagagcgtttcgaagctcgtcagaattggacctccatcgagaatatcaaagagcttaaagcggggtacatttcacaggtggtgcataagatttgcgagttggtagaaaaatacgacgccgtaatcgcattggaggatctgaattcgggtttcaaaaacagccgtgttaaggttgaaaaacaagtctatcaaaaattcgaaaagatgttaattgacaaattgaactatatggttgataaaaagtcgaatccatgtgcgacagggggggcattaaagggatatcagattactaataaattcgaatcgttcaagagcatgagcactcaaaatggcttcatcttttacatcccagcatggctgacctcgaaaattgatccttccacaggtttcgtcaaccttttgaagactaagtatactagtattgcggactcgaagaagttcatcagttctttcgaccgtattatgtatgtgccggaggaggatctgtttgagttcgcattggattataagaatttcagccgcaccgacgcggactacattaaaaaatggaaattatactcatacggaaatcgcattcgtatctttcgtaatcccaaaaagaacaatgttttcgactgggaggaagtgtgccttacttcggcgtataaggagcttttcaacaaatacggaattaactaccagcagggcgatattcgcgccctgttatgtgaacaatctgataaagcgttttacagctcctttatggcattaatgtccttaatgttgcagatgcgcaactcgatcacgggtcgtacagacgttgatttcttaatctcaccggttaagaacagtgacggcatcttctacgactctcgcaactacgaggcacaggagaatgccatcttacccaagaacgcagatgcaaatggtgcgtacaatatcgctcgtaaagtcctttgggcaatcggccaattcaagaaggctgaagacgagaagctggacaaggtgaaaatcgcgatttctaataaggaatggctggagtatgcgcagacgagtgtaaagcac

SEQ ID NO: 342 - DNA, 3684 bp, synthetic construct
  misc_feature 1..3684: note = SYNTHETIC
  source 1..3684: mol_type = other DNA
atgtctaaactggagaaattcactaattgctactccttgtcaaaaacattgcgatttaaagctatacccgttggtaagactcaggaaaacatcgacaacaaacggcttctggtagaggacgaaaaacgcgccgaggattataaaggagtaaaaaaactgttggacaggtactacctgagtttcatcaatgacgtgctgcatagtattaaactgaaaaacctcaacaattacatctctctgtttagaaaaaagacacggacggaaaaggagaataaagaattggagaatcttgagataaacctgcgcaaggaaatagccaaggcattcaaaggaaacgaaggctacaagtccttgtttaaaaaggatattatcgagaccatacttcccgagtttttggacgacaaagacgaaatcgctctggtgaactcttttaatggctttactacagcctttacaggattttttgacaacagagagaatatgttctctgaggaggcaaagtctaccagcattgccttccgatgtataaacgaaaacctgacaagatatatatcaaacatggacatttttgaaaaagttgatgcgatatttgacaaacacgaggtccaagagataaaggaaaaaatcctgaactcagattacgacgtggaagatttttttgagggtgagtttttcaatttcgttcttacgcaggaggggatcgacgtatataacgctatcattgggggcttcgttaccgaatctggagaaaagatcaaaggccttaacgagtatataaatctgtacaatcagaaaacgaagcaaaagctcccaaagttcaagcccctttataaacaggtccttagtgaccgggaaagcctctctttctatggagaagggtacacctccgatgaagaggttctggaggtgttccgaaatactctcaataaaaactctgaaattttcagcagcatcaaaaaattggagaagctctttaaaaatttcgacgaatattcctctgctggaatatttgtgaagaacggacccgcaatctctaccataagcaaggatatctttggtgaatggaatgtaattagagataaatggaatgcggagtacgatgacatccacctcaaaaaaaaggctgtcgtaacggagaaatacgaagatgaccgcagaaagagtttcaaaaaaatcggttctttttcactggaacagctccaggaatacgcggatgccgacttgagcgttgtagaaaaactgaaagaaataattatccagaaagtagatgagatttacaaagtgtatgggagcagcgaaaaactttttgatgcagattttgtacttgaaaaaagtcttaaaaaaaatgatgcagttgtcgccattatgaaagatctcctcgacagtgtaaaatcttttgagaattacatcaaggctttttttggcgagggcaaggagacgaatagggatgaaagtttttatggtgactttgtacttgcttacgacatcctgctcaaggtcgatcatatttacgatgctatacgcaattacgtgacacagaaaccgtactctaaagataagtttaagttgtatttccagaatcctcagttcatgggtggctgggacaaggataaggagacagattatcgagcgactattttgcgctatggctctaagtattacctcgctataatggacaaaaagtacgctaaatgcctgcagaaaattgataaggacgacgtgaacggtaactatgagaaaattaactataagttgttgcccggccctaataagatgctgccgaaagtctttttctccaaaaagtggatggcgtactacaatccatcagaagatatccagaagatatacaagaatggcacctttaagaaaggagatatgtttaaccttaacgactgtcacaagttgattgacttctttaaggatagcatttctcgatacccaaagtggtctaatgcatatgatttcaatttctctgagacggagaagtataaagacattgcggggttctaccgagaagtcgaagaacaagggtacaaggtaagttttgaatctgcttcaaaaaaagaggtagacaaactggtagaagagggaaaactctacatgttccagatctataataaggacttctctgacaaaagtcacggtactccgaacctccatacgatgtacttcaagctgctttttgatgaaaacaatcatggccagatacgcctcagtggaggagcggaattgtttatgcgccgcgcctccctgaagaaagaagagctggtagtacatcctgccaattccccaatcgcaaacaaaaatccggataatcctaaaaagaccactacgttgagctacgacgtttacaaggataagagattttccgaggatcagtacgagcttcatatccctatcgccataaataagtgcccaaagaatattttcaaaataaacacggaagtaagagtactgctcaagcatgatgataatccctacgtaattggaattgataggggggaacggaacttgctttatatagtcgtcgtcgatggcaaagggaacattgttgaacaatactctctgaatgagatcatcaacaacttcaacggtatccgcattaaaactgattatcattctctcctggacaaaaaagaaaaggaaaggttcgaagcgcgccagaactggacttcaattgaaaacattaaggagctcaaagctggctatatatctcaggttgtccataagatatgcgaactggtagaaaaatatgatgccgtcattgctctcgaggacctgaacagcggttttaagaacagccgggtcaaagtcgaaaagcaggtctatcaaaagttcgagaagatgctcatagacaaactcaactatatggtcgataagaagtctaacccgtgtgctacgggaggggcactgaagggataccagatcacgaataagtttgaatcattcaaaagcatgagtacccaaaatggatttattttctacattcccgcgtggttgacctcaaaaatcgaccctagtacaggattcgtgaacctgctgaagactaagtacactagtattgcggatagcaagaaatttataagctcttttgaccgcattatgtacgtacccgaagaagatttgtttgagttcgctctcgactacaaaaattttagcagaaccgacgccgattacataaagaagtggaaactctactcttatgggaaccgcatacgcatattccgaaaccctaaaaaaaacaatgtattcgattgggaagaggtttgcctgaccagcgcgtacaaagagctttttaacaagtatggtataaattatcagcagggtgacatccgcgccttgttgtgtgagcaaagtgacaaggcgttctacagttcatttatggcgttgatgtccctcatgttgcagatgcgaaattccatcacggggaggacagatgtagatttcctcatctctccggtcaagaacagtgatggcatcttttacgacagccggaattacgaggcgcaggagaatgccatactccctaagaatgcggacgcgaacggagcatataacatcgcgcgaaaagtcctgtgggctattggtcaattcaaaaaggctgaagatgagaagttggacaaggtgaagatagccattagtaacaaggaatggttggagtacgctcagacatcagtgaaacat

SEQ ID NO: 343 - DNA, 717 bp, synthetic construct
  misc_feature 1..717: note = SYNTHETIC
  source 1..717: mol_type = other DNA
atggtaagtaaaggtgaagagctttttacaggtgtggtgcccatccttgtggagttggacggtgatgtcaatggccataaattttctgtgtctggtgaaggggaaggggacgcgacgtatggaaaacttaccctgaagtttatctgcacgacaggtaagttgccagtaccgtggcctaccctggtcaccacattaacatatggtgttcaatgcttttcacgctaccctgaccacatgaaacaacatgacttttttaaaagtgccatgccagagggctacgtgcaggaacgcacaatctttttcaaagacgacggcaattataaaacacgcgcggaggtaaagtttgagggagacacactggttaatcgcatcgaactgaaaggcattgactttaaggaggatgggaatatcttaggccataaactggagtataactataactctcacaacgtctatattatggcggacaagcaaaagaatggtatcaaggtaaactttaagattcgtcataacattgaggatgggagcgtgcagttggctgaccactatcagcagaatactcccattggcgacggccccgtgcttttacctgacaatcactatctttctacgcagtcagctttgtccaaagaccccaacgagaagcgtgatcacatggttcttctggaattcgtcacagccgccggaatcactttaggcatggacgaactttataaa

SEQ ID NO: 344 - DNA, 717 bp, synthetic construct
  misc_feature 1..717: note = SYNTHETIC
  source 1..717: mol_type = other DNA
atggtctcaaaaggcgaagaattgttcaccggtgtagtccctatcttggtggagcttgacggcgatgttaatggccataaatttagtgtgtccggcgaaggtgagggcgacgccacatatggtaaacttacgcttaaatttatttgcacgacgggaaagctccccgtgccgtggccaacccttgtaactacccttacgtacggggtgcagtgcttcagtaggtatcccgaccatatgaagcagcacgattttttcaaaagtgctatgcccgaggggtatgtgcaagagaggactatattctttaaggatgatgggaattacaagacgcgagccgaggttaagttcgaaggtgatacgcttgtaaatcgaatcgaattgaaagggattgactttaaggaagacggaaatatacttggacacaaattggaatataactacaacagccacaacgtctatataatggccgacaagcaaaagaacggaataaaagtcaactttaagattcgacacaatatagaggatggatccgtgcagcttgctgaccactatcagcagaacactccgataggcgatggaccagtgctgcttcccgacaatcactacctctccacgcagtctgctctgtctaaagaccctaatgaaaaacgagaccacatggtgctgctcgaatttgtcactgccgccgggattaccttgggaatggacgaactgtataag

SEQ ID NO: 345 - DNA, 708 bp, synthetic construct
  misc_feature 1..708: note = SYNTHETIC
  source 1..708: mol_type = other DNA
atggtgtccaaaggagaagaggataacatggcgatcatcaaggaatttatgcgtttcaaagttcacatggagggaagcgtaaacggccatgaatttgagattgagggggaaggcgaaggccgtccatacgaaggcactcaaaccgccaagcttaaggttaccaagggaggtccgcttcctttcgcctgggatatccttagcccacagttcatgtatggctctaaagcatacgtcaagcaccctgcagacattcctgattatttgaaacttagttttcctgagggttttaagtgggaacgcgttatgaatttcgaggatggaggagtagtgacagtaactcaagattccagtcttcaagacggagagtttatctacaaggtgaaattacgtggcacgaactttccatccgacgggccagtgatgcagaagaaaaccatgggttgggaggcatcttctgagcgtatgtacccggaagacggggcgttgaaaggcgaaatcaagcagcgcctgaagttgaaagacgggggtcactacgatgcggaagtaaaaactacatataaggccaagaagcccgtccagcttccgggcgcgtacaacgtcaacatcaaattggacattacttcccacaacgaggattacactattgttgaacaatatgagcgtgcggagggacgccattcaaccggggggatggatgagctttacaag

SEQ ID NO: 346 - DNA, 708 bp, synthetic construct
  misc_feature 1..708: note = SYNTHETIC
  source 1..708: mol_type = other DNA
atggtcagtaagggggaagaggacaacatggcgataatcaaggaatttatgagatttaaggtccatatggaaggctctgtcaacggtcatgagttcgaaattgagggggagggggaaggccgcccatatgaggggactcaaacagccaaacttaaggtcacaaaaggaggtcctctgcccttcgcgtgggacatactcagcccacaattcatgtatggaagtaaggcatatgttaaacacccggcggacatacccgactacctcaaactgtcatttcctgagggttttaagtgggagagggttatgaatttcgaggacggtggagtagtaacagtgacacaagactcttctctccaggatggagaatttatatacaaagtgaaactgcggggcactaactttccgtcagacggcccagtaatgcaaaagaaaactatggggtgggaggcttccagcgagcgcatgtatcccgaggatggggcccttaagggagaaataaaacaacgcttgaagctcaaagacggagggcactatgatgcggaggtcaaaacgacctacaaagcaaaaaagccagtacagcttccgggagcttataacgtgaatataaagctcgatataacctcacacaacgaggactacacgattgtagaacaatacgaaagagccgaggggagacatagtacggggggcatggacgaactttacaag

SEQ ID NO: 347 - DNA, 4104 bp, synthetic construct
  misc_feature 1..4104: note = SYNTHETIC
  source 1..4104: mol_type = other DNA
atggacaaaaagtactctattggcctggatatcgggaccaacagcgtcgggtgggctgttatcaccgacgagtataaagtaccttcgaaaaagttcaaagtgctgggcaacaccgatcgccattcaatcaaaaagaacttgattggtgcgctgttgtttgactccggggaaaccgccgaggcgactcgccttaaacgtacagcacgtcgccggtacactcggcgtaagaatcgcatttgctatttgcaggaaatctttagcaacgagatggcaaaagtcgatgactcgtttttccaccgcctcgaggaaagctttctggtggaggaagacaaaaagcatgagcgtcacccgatcttcggcaacattgtcgatgaagtagcgtatcatgaaaaatacccaaccatttaccacttacgcaaaaagctggtggacagcactgacaaagctgatttgcgccttatctatttagccctggcacatatgattaagtttcgtggtcacttcctgatcgaaggagacttaaatcccgacaacagtgatgttgataaattgtttattcagcttgtccaaacttacaatcaactgttcgaggaaaacccgatcaatgcctccggtgtggatgcaaaagccattttaagtgcacgccttagcaagtcccgtcgcttagaaaaccttatcgcgcagctgcccggcgagaaaaagaatggtttgtttgggaaccttattgccttgagcttaggcctcaccccgaatttcaaaagtaatttcgatcttgcagaagacgccaaattacaactgtcgaaggatacttatgatgacgatctcgataatctgttagcgcagattggtgaccaatacgccgatctttttctggcggctaaaaatctgagcgacgccatcttgctttcggatattctccgcgttaacaccgaaatcacgaaagcgcctcttagtgccagcatgattaaacgttatgatgaacaccaccaggacctgaccttactcaaagcgttggttcgccagcaactgccagagaagtacaaagaaatcttctttgatcagtcaaagaatggttatgccggctatattgacgggggtgcaagccaagaggaattctacaaatttatcaagcctattctggagaaaatggatggcaccgaagagttattggtgaagcttaaccgtgaagacctcctgcggaaacagcgcacattcgataatggttcgatcccacaccaaatccatttgggggagttacacgctattttgcgtcgccaggaagacttttaccctttcctgaaggataaccgggagaaaattgagaagatccttacctttcgtattccgtattacgtaggccccttagcacggggtaatagccgtttcgcgtggatgacacggaagtcggaagagacgatcaccccgtggaacttcgaagaggtagtcgacaagggcgcatcagcgcagtcttttattgaacgtatgacgaatttcgataaaaacttgcccaatgagaaggtgcttccgaaacattccttgttatatgaatattttacagtttacaacgagctgaccaaggttaaatacgtgacggaaggaatgcgcaagcccgcttttcttagcggtgagcaaaaaaaggcgatcgtcgacctgttattcaaaacgaatcgtaaggtgactgtaaagcaactcaaagaagattacttcaaaaagattgagtgcttcgacagcgtcgaaatctctggggtagaggatcggtttaacgcaagtttaggtacctaccatgacctgcttaaaatcattaaggataaagacttcttagataatgaagagaacgaagatattctcgaggacatcgtcttgacgttaaccttatttgaggatcgtgaaatgattgaggaacgcctcaaaacttatgcccacctgttcgacgataaggtgatgaagcagctgaaacgtcggcgctacacaggatggggccgcttgagtcgcaaacttattaacggaatccgtgacaagcaatccggcaaaacgattctggatttcttgaagtcggacggatttgctaatcgcaacttcatgcagttgatccatgatgactccctgacttttaaagaggatattcaaaaggcgcaggttagtggtcaaggcgacagcttacacgaacacatcgcaaatttggctggttcgccggccattaaaaaggggatcctccagaccgtgaaagttgtagatgagcttgttaaggtcatgggtcgtcataagcccgaaaacatcgtgattgaaatggcgcgggagaatcaaacgacccagaaaggacaaaagaatagccgtgaacggatgaagcggatcgaggaaggcattaaagagctggggtctcaaatcttgaaggaacaccctgtggagaacactcagctccaaaatgaaaaactttacctgtactatttgcagaacggacgcgatatgtacgtggaccaagagttggatattaatcggctgagtgactacgacgttgatcatatcgtcccgcagagcttcctcaaagacgattctattgacaataaggtactgacgcgctctgataaaaaccgtggtaagtcggacaacgtgccctccgaagaggttgtgaaaaagatgaaaaattattggcgccagcttttaaacgcgaagctgatcacacaacgtaaattcgataatttgaccaaggctgaacggggtggcctgagcgagttagataaggcaggatttattaaacgccagttagtggagactcgtcaaatcaccaaacatgtcgcgcagattttggacagccggatgaacaccaagtacgatgaaaatgacaaactgatccgtgaggtgaaagtcattactctgaagtccaaattagttagtgatttccggaaggactttcaattctacaaagtccgtgaaattaataactatcatcacgcacatgacgcgtacctgaatgcagtggttgggaccgcccttatcaagaaatatcctaagctggagtcggagtttgtctatggcgactataaggtatacgatgttcgcaaaatgattgcgaaatctgagcaggagatcggtaaggcaaccgcaaaatatttcttttactcaaacattatgaatttctttaagacagaaatcactctggccaacggggagattcgcaaacgtccgttgatcgaaacaaacggcgagactggcgaaattgtttgggacaaagggcgtgatttcgcgacggtgcgcaaggtactgagcatgcctcaagtcaatattgttaagaaaaccgaagtgcagacgggcgggttttccaaggaaagcatcttacccaaacgtaattcagataaacttattgcacgcaaaaaggactgggatccgaaaaagtatggaggcttcgacagtccaaccgtagcctactctgttctcgttgtagcgaaagtagaaaagggtaaatccaagaaactgaaatctgtcaaggagttgcttggaatcaccattatggagcgtagctccttcgagaagaacccgattgactttctggaagccaaaggatataaagaggtcaagaaagatcttatcattaagctgcctaagtattcactcttcgagctggaaaatggtcgtaaacgcatgctcgcttctgccggcgagttgcagaagggcaatgaattagcacttccatcaaagtacgttaacttcctgtatttggccagccattacgagaaactgaaggggtctccagaggacaacgaacagaaacaattatttgtagagcagcacaagcattatcttgatgaaatcattgagcaaatttccgaattcagtaaacgcgtaatcctggccgatgcaaacctcgacaaggtgctgagcgcttacaataagcatcgcgacaaacctatccgtgagcaggctgaaaatatcattcacctgttcacattaacgaacctgggcgctccggccgcttttaaatatttcgacacgacaatcgaccgtaagcgctataccagtacgaaagaagtgttggatgcgacccttattcaccagtcaattacaggattatatgagacccgtatcgaccttagccaattaggtggggat

SEQ ID NO: 348 - DNA, 4857 bp, synthetic construct
  misc_feature 1..4857: note = SYNTHETIC
  source 1..4857: mol_type = other DNA
atggacaaaaagtactctattggcctggatatcgggaccaacagcgtcgggtgggctgttatcaccgacgagtataaagtaccttcgaaaaagttcaaagtgctgggcaacaccgatcgccattcaatcaaaaagaacttgattggtgcgctgttgtttgactccggggaaaccgccgaggcgactcgccttaaacgtacagcacgtcgccggtacactcggcgtaagaatcgcatttgctatttgcaggaaatctttagcaacgagatggcaaaagtcgatgactcgtttttccaccgcctcgaggaaagctttctggtggaggaagacaaaaagcatgagcgtcacccgatcttcggcaacattgtcgatgaagtagcgtatcatgaaaaatacccaaccatttaccacttacgcaaaaagctggtggacagcactgacaaagctgatttgcgccttatctatttagccctggcacatatgattaagtttcgtggtcacttcctgatcgaaggagacttaaatcccgacaacagtgatgttgataaattgtttattcagcttgtccaaacttacaatcaactgttcgaggaaaacccgatcaatgcctccggtgtggatgcaaaagccattttaagtgcacgccttagcaagtcccgtcgcttagaaaaccttatcgcgcagctgcccggcgagaaaaagaatggtttgtttgggaaccttattgccttgagcttaggcctcaccccgaatttcaaaagtaatttcgatcttgcagaagacgccaaattacaactgtcgaaggatacttatgatgacgatctcgataatctgttagcgcagattggtgaccaatacgccgatctttttctggcggctaaaaatctgagcgacgccatcttgctttcggatattctccgcgttaacaccgaaatcacgaaagcgcctcttagtgccagcatgattaaacgttatgatgaacaccaccaggacctgaccttactcaaagcgttggttcgccagcaactgccagagaagtacaaagaaatcttctttgatcagtcaaagaatggttatgccggctatattgacgggggtgcaagccaagaggaattctacaaatttatcaagcctattctggagaaaatggatggcaccgaagagttattggtgaagcttaaccgtgaagacctcctgcggaaacagcgcacattcgataatggttcgatcccacaccaaatccatttgggggagttacacgctattttgcgtcgccaggaagacttttaccctttcctgaaggataaccgggagaaaattgagaagatccttacctttcgtattccgtattacgtaggccccttagcacggggtaatagccgtttcgcgtggatgacacggaagtcggaagagacgatcaccccgtggaacttcgaagaggtagtcgacaagggcgcatcagcgcagtcttttattgaacgtatgacgaatttcgataaaaacttgcccaatgagaaggtgcttccgaaacattccttgttatatgaatattttacagtttacaacgagctgaccaaggttaaatacgtgacggaaggaatgcgcaagcccgcttttcttagcggtgagcaaaaaaaggcgatcgtcgacctgttattcaaaacgaatcgtaaggtgactgtaaagcaactcaaagaagattacttcaaaaagattgagtgcttcgacagcgtcgaaatctctggggtagaggatcggtttaacgcaagtttaggtacctaccatgacctgcttaaaatcattaaggataaagacttcttagataatgaagagaacgaagatattctcgaggacatcgtcttgacgttaaccttatttgaggatcgtgaaatgattgaggaacgcctcaaaacttatgcccacctgttcgacgataaggtgatgaagcagctgaaacgtcggcgctacacaggatggggccgcttgagtcgcaaacttattaacggaatccgtgacaagcaatccggcaaaacgattctggatttcttgaagtcggacggatttgctaatcgcaacttcatgcagttgatccatgatgactccctgacttttaaagaggatattcaaaaggcgcaggttagtggtcaaggcgacagcttacacgaacacatcgcaaatttggctggttcgccggccattaaaaaggggatcctccagaccgtgaaagttgtagatgagcttgttaaggtcatgggtcgtcataagcccgaaaacatcgtgattgaaatggcgcgggagaatcaaacgacccagaaaggacaaaagaatagccgtgaacggatgaagcggatcgaggaaggcattaaagagctggggtctcaaatcttgaaggaacaccctgtggagaacactcagctccaaaatgaaaaactttacctgtactatttgcagaacggacgcgatatgtacgtggaccaagagttggatattaatcggctgagtgactacgacgttgatcatatcgtcccgcagagcttcctcaaagacgattctattgacaataaggtactgacgcgctctgataaaaaccgtggtaagtcggacaacgtgccctccgaagaggttgtgaaaaagatgaaaaattattggcgccagcttttaaacgcgaagctgatcacacaacgtaaattcgataatttgaccaaggctgaacggggtggcctgagcgagttagataaggcaggatttattaaacgccagttagtggagactcgtcaaatcaccaaacatgtcgcgcagattttggacagccggatgaacaccaagtacgatgaaaatgacaaactgatccgtgaggtgaaagtcattactctgaagtccaaattagttagtgatttccggaaggactttcaattctacaaagtccgtgaaattaataactatcatcacgcacatgacgcgtacctgaatgcagtggttgggaccgcccttatcaagaaatatcctaagctggagtcggagtttgtctatggcgactataaggtatacgatgttcgcaaaatgattgcgaaatctgagcaggagatcggtaaggcaaccgcaaaatatttcttttactcaaacattatgaatttctttaagacagaaatcactctggccaacggggagattcgcaaacgtccgttgatcgaaacaaacggcgagactggcgaaattgtttgggacaaagggcgtgatttcgcgacggtgcgcaaggtactgagcatgcctcaagtcaatattgttaagaaaaccgaagtgcagacgggcgggttttccaaggaaagcatcttacccaaacgtaattcagataaacttattgcacgcaaaaaggactgggatccgaaaaagtatggaggcttcgacagtccaaccgtagcctactctgttctcgttgtagcgaaagtagaaaagggtaaatccaagaaactgaaatctgtcaaggagttgcttggaatcaccattatggagcgtagctccttcgagaagaacccgattgactttctggaagccaaaggatataaagaggtcaagaaagatcttatcattaagctgcctaagtattcactcttcgagctggaaaatggtcgtaaacgcatgctcgcttctgccggcgagttgcagaagggcaatgaattagcacttccatcaaagtacgttaacttcctgtatttggccagccattacgagaaactgaaggggtctccagaggacaacgaacagaaacaattatttgtagagcagcacaagcattatcttgatgaaatcattgagcaaatttccgaattcagtaaacgcgtaatcctggccgatgcaaacctcgacaaggtgctgagcgcttacaataagcatcgcgacaaacctatccgtgagcaggctgaaaatatcattcacctgttcacattaacgaacctgggcgctccggccgcttttaaatatttcgacacgacaatcgaccgtaagcgctataccagtacgaaagaagtgttggatgcgacccttattcaccagtcaattacaggattatatgagacccgtatcgaccttagccaattaggtggggatggtagcgcaggtagtgcagcaggtagcggtgaatttatggttagcaaaggtgaagaactgtttaccggcgttgtgccgattctggtggaactggatggtgatgtgaatggccataaatttagcgttagcggcgaaggcgaaggtgatgcgacctatggtaaactgaccctgaaatttatttgcaccaccggtaaactgccggttccgtggccgaccctggtgaccaccctgacctatggcgttcagtgctttagccgctatccggatcatatgaaacagcatgatttctttaaaagcgcgatgccggaaggctatgtgcaggaacgtaccatttttttcaaagatgatggcaactataaaacccgtgcggaagttaaatttgaaggcgataccctggtgaaccgcattgaactgaaaggtattgattttaaagaagatggcaacattctgggtcataaactggaatataattacaacagccataatgtgtatattatggccgataaacagaaaaatggcatcaaagtgaactttaaaatccgtcacaacattgaagatggtagcgtgcagctggcggatcattatcagcagaataccccgattggtgatggcccggtgctgctgccggataatcattatctgagcacccagagcgcgctgagcaaagatccgaatgaaaaacgtgatcatatggtgctgctggaatttgttaccgccgcgggcattaccctgggtatggatgaactgtataaa

SEQ ID NO: 349 - DNA, 4881 bp, synthetic construct
  misc_feature 1..4881: note = SYNTHETIC
  source 1..4881: mol_type = other DNA
atggacaaaaagtactctattggcctggatatcgggaccaacagcgtcgggtgggctgttatcaccgacgagtataaagtaccttcgaaaaagttcaaagtgctgggcaacaccgatcgccattcaatcaaaaagaacttgattggtgcgctgttgtttgactccggggaaaccgccgaggcgactcgccttaaacgtacagcacgtcgccggtacactcggcgtaagaatcgcatttgctatttgcaggaaatctttagcaacgagatggcaaaagtcgatgactcgtttttccaccgcctcgaggaaagctttctggtggaggaagacaaaaagcatgagcgtcacccgatcttcggcaacattgtcgatgaagtagcgtatcatgaaaaatacccaaccatttaccacttacgcaaaaagctggtggacagcactgacaaagctgatttgcgccttatctatttagccctggcacatatgattaagtttcgtggtcacttcctgatcgaaggagacttaaatcccgacaacagtgatgttgataaattgtttattcagcttgtccaaacttacaatcaactgttcgaggaaaacccgatcaatgcctccggtgtggatgcaaaagccattttaagtgcacgccttagcaagtcccgtcgcttagaaaaccttatcgcgcagctgcccggcgagaaaaagaatggtttgtttgggaaccttattgccttgagcttaggcctcaccccgaatttcaaaagtaatttcgatcttgcagaagacgccaaattacaactgtcgaaggatacttatgatgacgatctcgataatctgttagcgcagattggtgaccaatacgccgatctttttctggcggctaaaaatctgagcgacgccatcttgctttcggatattctccgcgttaacaccgaaatcacgaaagcgcctcttagtgccagcatgattaaacgttatgatgaacaccaccaggacctgaccttactcaaagcgttggttcgccagcaactgccagagaagtacaaagaaatcttctttgatcagtcaaagaatggttatgccggctatattgacgggggtgcaagccaagaggaattctacaaatttatcaagcctattctggagaaaatggatggcaccgaagagttattggtgaagcttaaccgtgaagacctcctgcggaaacagcgcacattcgataatggttcgatcccacaccaaatccatttgggggagttacacgctattttgcgtcgccaggaagacttttaccctttcctgaaggataaccgggagaaaattgagaagatccttacctttcgtattccgtattacgtaggccccttagcacggggtaatagccgtttcgcgtggatgacacggaagtcggaagagacgatcaccccgtggaacttcgaagaggtagtcgacaagggcgcatcagcgcagtcttttattgaacgtatgacgaatttcgataaaaacttgcccaatgagaaggtgcttccgaaacattccttgttatatgaatattttacagtttacaacgagctgaccaaggttaaatacgtgacggaaggaatgcgcaagcccgcttttcttagcggtgagcaaaaaaaggcgatcgtcgacctgttattcaaaacgaatcgtaaggtgactgtaaagcaactcaaagaagattacttcaaaaagattgagtgcttcgacagcgtcgaaatctctggggtagaggatcggtttaacgcaagtttaggtacctaccatgacctgcttaaaatcattaaggataaagacttcttagataatgaagagaacgaagatattctcgaggacatcgtcttgacgttaaccttatttgaggatcgtgaaatgattgaggaacgcctcaaaacttatgcccacctgttcgacgataaggtgatgaagcagctgaaacgtcggcgctacacaggatggggccgcttgagtcgcaaacttattaacggaatccgtgacaagcaatccggcaaaacgattctggatttcttgaagtcggacggatttgctaatcgcaacttcatgcagttgatccatgatgactccctgacttttaaagaggatattcaaaaggcgcaggttagtggtcaaggcgacagcttacacgaacacatcgcaaatttggctggttcgccggccattaaaaaggggatcctccagaccgtgaaagttgtagatgagcttgttaaggtcatgggtcgtcataagcccgaaaacatcgtgattgaaatggcgcgggagaatcaaacgacccagaaaggacaaaagaatagccgtgaacggatgaagcggatcgaggaaggcattaaagagctggggtctcaaatcttgaaggaacaccctgtggagaacactcagctccaaaatgaaaaactttacctgtactatttgcagaacggacgcgatatgtacgtggaccaagagttggatattaatcggctgagtgactacgacgttgatcatatcgtcccgcagagcttcctcaaagacgattctattgacaataaggtactgacgcgctctgataaaaaccgtggtaagtcggacaacgtgccctccgaagaggttgtgaaaaagatgaaaaattattggcgccagcttttaaacgcgaagctgatcacacaacgtaaattcgataatttgaccaaggctgaacggggtggcctgagcgagttagataaggcaggatttattaaacgccagttagtggagactcgtcaaatcaccaaacatgtcgcgcagattttggacagccggatgaacaccaagtacgatgaaaatgacaaactgatccgtgaggtgaaagtcattactctgaagtccaaattagttagtgatttccggaaggactttcaattctacaaagtccgtgaaattaataactatcatcacgcacatgacgcgtacctgaatgcagtggttgggaccgcccttatcaagaaatatcctaagctggagtcggagtttgtctatggcgactataaggtatacgatgttcgcaaaatgattgcgaaatctgagcaggagatcggtaaggcaaccgcaaaatatttcttttactcaaacattatgaatttctttaagacagaaatcactctggccaacggggagattcgcaaacgtccgttgatcgaaacaaacggcgagactggcgaaattgtttgggacaaagggcgtgatttcgcgacggtgcgcaaggtactgagcatgcctcaagtcaatattgttaagaaaaccgaagtgcagacgggcgggttttccaaggaaagcatcttacccaaacgtaattcagataaacttattgcacgcaaaaaggactgggatccgaaaaagtatggaggcttcgacagtccaaccgtagcctactctgttctcgttgtagcgaaagtagaaaagggtaaatccaagaaactgaaatctgtcaaggagttgcttggaatcaccattatggagcgtagctccttcgagaagaacccgattgactttctggaagccaaaggatataaagaggtcaagaaagatcttatcattaagctgcctaagtattcactcttcgagctggaaaatggtcgtaaacgcatgctcgcttctgccggcgagttgcagaagggcaatgaattagcacttccatcaaagtacgttaacttcctgtatttggccagccattacgagaaactgaaggggtctccagaggacaacgaacagaaacaattatttgtagagcagcacaagcattatcttgatgaaatcattgagcaaatttccgaattcagtaaacgcgtaatcctggccgatgcaaacctcgacaaggtgctgagcgcttacaataagcatcgcgacaaacctatccgtgagcaggctgaaaatatcattcacctgttcacattaacgaacctgggcgctccggccgcttttaaatatttcgacacgacaatcgaccgtaagcgctataccagtacgaaagaagtgttggatgcgacccttattcaccagtcaattacaggattatatgagacccgtatcgaccttagccaattaggtggggatggaggcggaggatcaggcggtggcggaagtggtggaggtgggtcgggaggtggtggtagcatggttagcaaaggtgaagaactgtttaccggcgttgtgccgattctggtggaactggatggtgatgtgaatggccataaatttagcgttagcggcgaaggcgaaggtgatgcgacctatggtaaactgaccctgaaatttatttgcaccaccggtaaactgccggttccgtggccgaccctggtgaccaccctgacctatggcgttcagtgctttagccgctatccggatcatatgaaacagcatgatttctttaaaagcgcgatgccggaaggctatgtgcaggaacgtaccatttttttcaaagatgatggcaactataaaacccgtgcggaagttaaatttgaaggcgataccctggtgaaccgcattgaactgaaaggtattgattttaaagaagatggcaacattctgggtcataaactggaatataattacaacagccataatgtgtatattatggccgataaacagaaaaatggcatcaaagtgaactttaaaatccgtcacaacattgaagatggtagcgtgcagctggcggatcattatcagcagaataccccgattggtgatggcccggtgctgctgccggataatcattatctgagcacccagagcgcgctgagcaaagatccgaatgaaaaacgtgatcatatggtgctgctggaatttgttaccgccgcgggcattaccctgggtatggatgaactgtataaa

SEQ ID NO: 350 - DNA, 4866 bp, synthetic construct
  misc_feature 1..4866: note = SYNTHETIC
  source 1..4866: mol_type = other DNA
atggacaaaaagtactctattggcctggatatcgggaccaacagcgtcgggtgggctgttatcaccgacgagtataaagtaccttcgaaaaagttcaaagtgctgggcaacaccgatcgccattcaatcaaaaagaacttgattggtgcgctgttgtttgactccggggaaaccgccgaggcgactcgccttaaacgtacagcacgtcgccggtacactcggcgtaagaatcgcatttgctatttgcaggaaatctttagcaacgagatggcaaaagtcgatgactcgtttttccaccgcctcgaggaaagctttctggtggaggaagacaaaaagcatgagcgtcacccgatcttcggcaacattgtcgatgaagtagcgtatcatgaaaaatacccaaccatttaccacttacgcaaaaagctggtggacagcactgacaaagctgatttgcgccttatctatttagccctggcacatatgattaagtttcgtggtcacttcctgatcgaaggagacttaaatcccgacaacagtgatgttgataaattgtttattcagcttgtccaaacttacaatcaactgttcgaggaaaacccgatcaatgcctccggtgtggatgcaaaagccattttaagtgcacgccttagcaagtcccgtcgcttagaaaaccttatcgcgcagctgcccggcgagaaaaagaatggtttgtttgggaaccttattgccttgagcttaggcctcaccccgaatttcaaaagtaatttcgatcttgcagaagacgccaaattacaactgtcgaaggatacttatgatgacgatctcgataatctgttagcgcagattggtgaccaatacgccgatctttttctggcggctaaaaatctgagcgacgccatcttgctttcggatattctccgcgttaacaccgaaatcacgaaagcgcctcttagtgccagcatgattaaacgttatgatgaacaccaccaggacctgaccttactcaaagcgttggttcgccagcaactgccagagaagtacaaagaaatcttctttgatcagtcaaagaatggttatgccggctatattgacgggggtgcaagccaagaggaattctacaaatttatcaagcctattctggagaaaatggatggcaccgaagagttattggtgaagcttaaccgtgaagacctcctgcggaaacagcgcacattcgataatggttcgatcccacaccaaatccatttgggggagttacacgctattttgcgtcgccaggaagacttttaccctttcctgaaggataaccgggagaaaattgagaagatccttacctttcgtattccgtattacgtaggccccttagcacggggtaatagccgtttcgcgtggatgacacggaagtcggaagagacgatcaccccgtggaacttcgaagaggtagtcgacaagggcgcatcagcgcagtcttttattgaacgtatgacgaatttcgataaaaacttgcccaatgagaaggtgcttccgaaacattccttgttatatgaatattttacagtttacaacgagctgaccaaggttaaatacgtgacggaaggaatgcgcaagcccgcttttcttagcggtgagcaaaaaaaggcgatcgtcgacctgttattcaaaacgaatcgtaaggtgactgtaaagcaactcaaagaagattacttcaaaaagattgagtgcttcgacagcgtcgaaatctctggggtagaggatcggtttaacgcaagtttaggtacctaccatgacctgcttaaaatcattaaggataaagacttcttagataatgaagagaacgaagatattctcgaggacatcgtcttgacgttaaccttatttgaggatcgtgaaatgattgaggaacgcctcaaaacttatgcccacctgttcgacgataaggtgatgaagcagctgaaacgtcggcgctacacaggatggggccgcttgagtcgcaaacttattaacggaatccgtgacaagcaatccggcaaaacgattctggatttcttgaagtcggacggatttgctaatcgcaacttcatgcagttgatccatgatgactccctgacttttaaagaggatattcaaaaggcgcaggttagtggtcaaggcgacagcttacacgaacacatcgcaaatttggctggttcgccggccattaaaaaggggatcctccagaccgtgaaagttgtagatgagcttgttaaggtcatgggtcgtcataagcccgaaaacatcgtgattgaaatggcgcgggagaatcaaacgacccagaaaggacaaaagaatagccgtgaacggatgaagcggatcgaggaaggcattaaagagctggggtctcaaatcttgaaggaacaccctgtggagaacactcagctccaaaatgaaaaactttacctgtactatttgcagaacggacgcgatatgtacgtggaccaagagttggatattaatcggctgagtgactacgacgttgatcatatcgtcccgcagagcttcctcaaagacgattctattgacaataaggtactgacgcgctctgataaaaaccgtggtaagtcggacaacgtgccctccgaagaggttgtgaaaaagatgaaaaattattggcgccagcttttaaacgcgaagctgatcacacaacgtaaattcgataatttgaccaaggctgaacggggtggcctgagcgagttagataaggcaggatttattaaacgccagttagtggagactcgtcaaatcaccaaacatgtcgcgcagattttggacagccggatgaacaccaagtacgatgaaaatgacaaactgatccgtgaggtgaaagtcattactctgaagtccaaattagttagtgatttccggaaggactttcaattctacaaagtccgtgaaattaataactatcatcacgcacatgacgcgtacctgaatgcagtggttgggaccgcccttatcaagaaatatcctaagctggagtcggagtttgtctatggcgactataaggtatacgatgttcgcaaaatgattgcgaaatctgagcaggagatcggtaaggcaaccgcaaaatatttcttttactcaaacattatgaatttctttaagacagaaatcactctggccaacggggagattcgcaaacgtccgttgatcgaaacaaacggcgagactggcgaaattgtttgggacaaagggcgtgatttcgcgacggtgcgcaaggtactgagcatgcctcaagtcaatattgttaagaaaaccgaagtgcagacgggcgggttttccaaggaaagcatcttacccaaacgtaattcagataaacttattgcacgcaaaaaggactgggatccgaaaaagtatggaggcttcgacagtccaaccgtagcctactctgttctcgttgtagcgaaagtagaaaagggtaaatccaagaaactgaaatctgtcaaggagttgcttggaatcaccattatggagcgtagctccttcgagaagaacccgattgactttctggaagccaaaggatataaagaggtcaagaaagatcttatcattaagctgcctaagtattcactcttcgagctggaaaatggtcgtaaacgcatgctcgcttctgccggcgagttgcagaagggcaatgaattagcacttccatcaaagtacgttaacttcctgtatttggccagccattacgagaaactgaaggggtctccagaggacaacgaacagaaacaattatttgtagagcagcacaagcattatcttgatgaaatcattgagcaaatttccgaattcagtaaacgcgtaatcctggccgatgcaaacctcgacaaggtgctgagcgcttacaataagcatcgcgacaaacctatccgtgagcaggctgaaaatatcattcacctgttcacattaacgaacctgggcgctccggccgcttttaaatatttcgacacgacaatcgaccgtaagcgctataccagtacgaaagaagtgttggatgcgacccttattcaccagtcaattacaggattatatgagacccgtatcgaccttagccaattaggtggggatggaggcggagggtcggaagcggcagcaaaaggaggcggaggaagtatggttagcaaaggtgaagaactgtttaccggcgttgtgccgattctggtggaactggatggtgatgtgaatggccataaatttagcgttagcggcgaaggcgaaggtgatgcgacctatggtaaactgaccctgaaatttatttgcaccaccggtaaactgccggttccgtggccgaccctggtgaccaccctgacctatggcgttcagtgctttagccgctatccggatcatatgaaacagcatgatttctttaaaagcgcgatgccggaaggctatgtgcaggaacgtaccatttttttcaaagatgatggcaactataaaacccgtgcggaagttaaatttgaaggcgataccctggtgaaccgcattgaactgaaaggtattgattttaaagaagatggcaacattctgggtcataaactggaatataattacaacagccataatgtgtatattatggccgataaacagaaaaatggcatcaaagtgaactttaaaatccgtcacaacattgaagatggtagcgtgcagctggcggatcattatcagcagaataccccgattggtgatggcccggtgctgctgccggataatcattatctgagcacccagagcgcgctgagcaaagatccgaatgaaaaacgtgatcatatggtgctgctggaatttgttaccgccgcgggcattaccctgggtatggatgaactgtataaa

SEQ ID NO: 351 - DNA, 4887 bp, synthetic construct
  misc_feature 1..4887: note = SYNTHETIC
  source 1..4887: mol_type = other DNA
atggacaaaaagtactctattggcctggatatcgggaccaacagcgtcgggtgggctgttatcaccgacgagtataaagtaccttcgaaaaagttcaaagtgctgggcaacaccgatcgccattcaatcaaaaagaacttgattggtgcgctgttgtttgactccggggaaaccgccgaggcgactcgccttaaacgtacagcacgtcgccggtacactcggcgtaagaatcgcatttgctatttgcaggaaatctttagcaacgagatggcaaaagtcgatgactcgtttttccaccgcctcgaggaaagctttctggtggaggaagacaaaaagcatgagcgtcacccgatcttcggcaacattgtcgatgaagtagcgtatcatgaaaaatacccaaccatttaccacttacgcaaaaagctggtggacagcactgacaaagctgatttgcgccttatctatttagccctggcacatatgattaagtttcgtggtcacttcctgatcgaaggagacttaaatcccgacaacagtgatgttgataaattgtttattcagcttgtccaaacttacaatcaactgttcgaggaaaacccgatcaatgcctccggtgtggatgcaaaagccattttaagtgcacgccttagcaagtcccgtcgcttagaaaaccttatcgcgcagctgcccggcgagaaaaagaatggtttgtttgggaaccttattgccttgagcttaggcctcaccccgaatttcaaaagtaatttcgatcttgcagaagacgccaaattacaactgtcgaaggatacttatgatgacgatctcgataatctgttagcgcagattggtgaccaatacgccgatctttttctggcggctaaaaatctgagcgacgccatcttgctttcggatattctccgcgttaacaccgaaatcacgaaagcgcctcttagtgccagcatgattaaacgttatgatgaacaccaccaggacctgaccttactcaaagcgttggttcgccagcaactgccagagaagtacaaagaaatcttctttgatcagtcaaagaatggttatgccggctatattgacgggggtgcaagccaagaggaattctacaaatttatcaagcctattctggagaaaatggatggcaccgaagagttattggtgaagcttaaccgtgaagacctcctgcggaaacagcgcacattcgataatggttcgatcccacaccaaatccatttgggggagttacacgctattttgcgtcgccaggaagacttttaccctttcctgaaggataaccgggagaaaattgagaagatccttacctttcgtattccgtattacgtaggccccttagcacggggtaatagccgtttcgcgtggatgacacggaagtcggaagagacgatcaccccgtggaacttcgaagaggtagtcgacaagggcgcatcagcgcagtcttttattgaacgtatgacgaatttcgataaaaacttgcccaatgagaaggtgcttccgaaacattccttgttatatgaatattttacagtttacaacgagctgaccaaggttaaatacgtgacggaaggaatgcgcaagcccgcttttcttagcggtgagcaaaaaaaggcgatcgtcgacctgttattcaaaacgaatcgtaaggtgactgtaaagcaactcaaagaagattacttcaaaaagattgagtgcttcgacagcgtcgaaatctctggggtagaggatcggtttaacgcaagtttaggtacctaccatgacctgcttaaaatcattaaggataaagacttcttagataatgaagagaacgaagatattctcgaggacatcgtcttgacgttaaccttatttgaggatcgtgaaatgattgaggaacgcctcaaaacttatgcccacctgttcgacgataaggtgatgaagcagctgaaacgtcggcgctacacaggatggggccgcttgagtcgcaaacttattaacggaatccgtgacaagcaatccggcaaaacgattctggatttcttgaagtcggacggatttgctaatcgcaacttcatgcagttgatccatgatgactccctgacttttaaagaggatattcaaaaggcgcaggttagtggtcaaggcgacagcttacacgaacacatcgcaaatttggctggttcgccggccattaaaaaggggatcctccagaccgtgaaagttgtagatgagcttgttaaggtcatgggtcgtcataagcccgaaaacatcgtgattgaaatggcgcgggagaatcaaacgacccagaaaggacaaaagaatagccgtgaacggatgaagcggatcgaggaaggcattaaagagctggggtctcaaatcttgaaggaacaccctgtggagaacactcagctccaaaatgaaaaactttacctgtactatttgcagaacggacgcgatatgtacgtggaccaagagttggatattaatcggctgagtgactacgacgttgatcatatcgtcccgcagagcttcctcaaagacgattctattgacaataaggtactgacgcgctctgataaaaaccgtggtaagtcggacaacgtgccctccgaagaggttgtgaaaaagatgaaaaattattggcgccagcttttaaacgcgaagctgatcacacaacgtaaattcgataatttgaccaaggctgaacggggtggcctgagcgagttagataaggcaggatttattaaacgccagttagtggagactcgtcaaatcaccaaacatgtcgcgcagattttggacagccggatgaacaccaagtacgatgaaaatgacaaactgatccgtgaggtgaaagtcattactctgaagtccaaattagttagtgatttccggaaggactttcaattctacaaagtccgtgaaattaataactatcatcacgcacatgacgcgtacctgaatgcagtggttgggaccgcccttatcaagaaatatcctaagctggagtcggagtttgtctatggcgactataaggtatacgatgttcgcaaaatgattgcgaaatctgagcaggagatcggtaaggcaaccgcaaaatatttcttttactcaaacattatgaatttctttaagacagaaatcactctggccaacggggagattcgcaaacgtccgttgatcgaaacaaacggcgagactggcgaaattgtttgggacaaagggcgtgatttcgcgacggtgcgcaaggtactgagcatgcctcaagtcaatattgttaagaaaaccgaagtgcagacgggcgggttttccaaggaaagcatcttacccaaacgtaattcagataaacttattgcacgcaaaaaggactgggatccgaaaaagtatggaggcttcgacagtccaaccgtagcctactctgttctcgttgtagcgaaagtagaaaagggtaaatccaagaaactgaaatctgtcaaggagttgcttggaatcaccattatggagcgtagctccttcgagaagaacccgattgactttctggaagccaaaggatataaagaggtcaagaaagatcttatcattaagctgcctaagtattcactcttcgagctggaaaatggtcgtaaacgcatgctcgcttctgccggcgagttgcagaagggcaatgaattagcacttccatcaaagtacgttaacttcctgtatttggccagccattacgagaaactgaaggggtctccagaggacaacgaacagaaacaattatttgtagagcagcacaagcattatcttgatgaaatcattgagcaaatttccgaattcagtaaacgcgtaatcctggccgatgcaaacctcgacaaggtgctgagcgcttacaataagcatcgcgacaaacctatccgtgagcaggctgaaaatatcattcacctgttcacattaacgaacctgggcgctccggccgcttttaaatatttcgacacgacaatcgaccgtaagcgctataccagtacgaaagaagtgttggatgcgacccttattcaccagtcaattacaggattatatgagacccgtatcgaccttagccaattaggtggggatgctgaggccgcagcaaaagaggctgccgctaaggaggctgctgcaaaagaagcagcagcgaaagctatggttagcaaaggtgaagaactgtttaccggcgttgtgccgattctggtggaactggatggtgatgtgaatggccataaatttagcgttagcggcgaaggcgaaggtgatgcgacctatggtaaactgaccctgaaatttatttgcaccaccggtaaactgccggttccgtggccgaccctggtgaccaccctgacctatggcgttcagtgctttagccgctatccggatcatatgaaacagcatgatttctttaaaagcgcgatgccggaaggctatgtgcaggaacgtaccatttttttcaaagatgatggcaactataaaacccgtgcggaagttaaatttgaaggcgataccctggtgaaccgcattgaactgaaaggtattgattttaaagaagatggcaacattctgggtcataaactggaatataattacaacagccataatgtgtatattatggccgataaacagaaaaatggcatcaaagtgaactttaaaatccgtcacaacattgaagatggtagcgtgcagctggcggatcattatcagcagaataccccgattggtgatggcccggtgctgctgccggataatcattatctgagcacccagagcgcgctgagcaaagatccgaatgaaaaacgtgatcatatggtgctgctggaatttgttaccgccgcgggcattaccctgggtatggatgaactgtataaa

SEQ ID NO: 352 - DNA, 4959 bp, synthetic construct
  misc_feature 1..4959: note = SYNTHETIC
  source 1..4959: mol_type = other DNA
atggacaaaaagtactctattggcctggatatcgggaccaacagcgtcgggtgggctgttatcaccgacgagtataaagtaccttcgaaaaagttcaaagtgctgggcaacaccgatcgccattcaatcaaaaagaacttgattggtgcgctgttgtttgactccggggaaaccgccgaggcgactcgccttaaacgtacagcacgtcgccggtacactcggcgtaagaatcgcatttgctatttgcaggaaatctttagcaacgagatggcaaaagtcgatgactcgtttttccaccgcctcgaggaaagctttctggtggaggaagacaaaaagcatgagcgtcacccgatcttcggcaacattgtcgatgaagtagcgtatcatgaaaaatacccaaccatttaccacttacgcaaaaagctggtggacagcactgacaaagctgatttgcgccttatctatttagccctggcacatatgattaagtttcgtggtcacttcctgatcgaaggagacttaaatcccgacaacagtgatgttgataaattgtttattcagcttgtccaaacttacaatcaactgttcgaggaaaacccgatcaatgcctccggtgtggatgcaaaagccattttaagtgcacgccttagcaagtcccgtcgcttagaaaaccttatcgcgcagctgcccggcgagaaaaagaatggtttgtttgggaaccttattgccttgagcttaggcctcaccccgaatttcaaaagtaatttcgatcttgcagaagacgccaaattacaactgtcgaaggatacttatgatgacgatctcgataatctgttagcgcagattggtgaccaatacgccgatctttttctggcggctaaaaatctgagcgacgccatcttgctttcggatattctccgcgttaacaccgaaatcacgaaagcgcctcttagtgccagcatgattaaacgttatgatgaacaccaccaggacctgaccttactcaaagcgttggttcgccagcaactgccagagaagtacaaagaaatcttctttgatcagtcaaagaatggttatgccggctatattgacgggggtgcaagccaagaggaattctacaaatttatcaagcctattctggagaaaatggatggcaccgaagagttattggtgaagcttaaccgtgaagacctcctgcggaaacagcgcacattcgataatggttcgatcccacaccaaatccatttgggggagttacacgctattttgcgtcgccaggaagacttttaccctttcctgaaggataaccgggagaaaattgagaagatccttacctttcgtattccgtattacgtaggccccttagcacggggtaatagccgtttcgcgtggatgacacggaagtcggaagagacgatcaccccgtggaacttcgaagaggtagtcgacaagggcgcatcagcgcagtcttttattgaacgtatgacgaatttcgataaaaacttgcccaatgagaaggtgcttccgaaacattccttgttatatgaatattttacagtttacaacgagctgaccaaggttaaatacgtgacggaaggaatgcgcaagcccgcttttcttagcggtgagcaaaaaaaggcgatcgtcgacctgttattcaaaacgaatcgtaaggtgactgtaaagcaactcaaagaagattacttcaaaaagattgagtgcttcgacagcgtcgaaatctctggggtagaggatcggtttaacgcaagtttaggtacctaccatgacctgcttaaaatcattaaggataaagacttcttagataatgaagagaacgaagatattctcgaggacatcgtcttgacgttaaccttatttgaggatcgtgaaatgattgaggaacgcctcaaaacttatgcccacctgttcgacgataaggtgatgaagcagctgaaacgtcggcgctacacaggatggggccgcttgagtcgcaaacttattaacggaatccgtgacaagcaatccggcaaaacgattctggatttcttgaagtcggacggatttgctaatcgcaacttcatgcagttgatccatgatgactccctgacttttaaagaggatattcaaaaggcgcaggttagtggtcaaggcgacagcttacacgaacacatcgcaaatttggctggttcgccggccattaaaaaggggatcctccagaccgtgaaagttgtagatgagcttgttaaggtcatgggtcgtcataagcccgaaaacatcgtgattgaaatggcgcgggagaatcaaacgacccagaaaggacaaaagaatagccgtgaacggatgaagcggatcgaggaaggcattaaagagctggggtctcaaatcttgaaggaacaccctgtggagaacactcagctccaaaatgaaaaactttacctgtactatttgcagaacggacgcgatatgtacgtggaccaagagttggatattaatcggctgagtgactacgacgttgatcatatcgtcccgcagagcttcctcaaagacgattctattgacaataaggtactgacgcgctctgataaaaaccgtggtaagtcggacaacgtgccctccgaagaggttgtgaaaaagatgaaaaattattggcgccagcttttaaacgcgaagctgatcacacaacgtaaattcgataatttgaccaaggctgaacggggtggcctgagcgagttagataaggcaggatttattaaacgccagttagtggagactcgtcaaatcaccaaacatgtcgcgcagattttggacagccggatgaacaccaagtacgatgaaaatgacaaactgatccgtgaggtgaaagtcattactctgaagtccaaattagttagtgatttccggaaggactttcaattctacaaagtccgtgaaattaataactatcatcacgcacatgacgcgtacctgaatgcagtggttgggaccgcccttatcaagaaatatcctaagctggagtcggagtttgtctatggcgactataaggtatacgatgttcgcaaaatgattgcgaaatctgagcaggagatcggtaaggcaaccgcaaaatatttcttttactcaaacattatgaatttctttaagacagaaatcactctggccaacggggagattcgcaaacgtccgttgatcgaaacaaacggcgagactggcgaaattgtttgggacaaagggcgtgatttcgcgacggtgcgcaaggtactgagcatgcctcaagtcaatattgttaagaaaaccgaagtgcagacgggcgggttttccaaggaaagcatcttacccaaacgtaattcagataaacttattgcacgcaaaaaggactgggatccgaaaaagtatggaggcttcgacagtccaaccgtagcctactctgttctcgttgtagcgaaagtagaaaagggtaaatccaagaaactgaaatctgtcaaggagttgcttggaatcaccattatggagcgtagctccttcgagaagaacccgattgactttctggaagccaaaggatataaagaggtcaagaaagatcttatcattaagctgcctaagtattcactcttcgagctggaaaatggtcgtaaacgcatgctcgcttctgccggcgagttgcagaagggcaatgaattagcacttccatcaaagtacgttaacttcctgtatttggccagccattacgagaaactgaaggggtctccagaggacaacgaacagaaacaattatttgtagagcagcacaagcattatcttgatgaaatcattgagcaaatttccgaattcagtaaacgcgtaatcctggccgatgcaaacctcgacaaggtgctgagcgcttacaataagcatcgcgacaaacctatccgtgagcaggctgaaaatatcattcacctgttcacattaacgaacctgggcgctccggccgcttttaaatatttcgacacgacaatcgaccgtaagcgctataccagtacgaaagaagtgttggatgcgacccttattcaccagtcaattacaggattatatgagacccgtatcgaccttagccaattaggtggggatgccgaagcagcagccaaagaagctgccgcaaaggaggcggcagctaaagaagcggccgctaaggcattggaagcggaggcggctgccaaggaggctgcggcgaaagaagctgcggccaaagaagcggctgcaaaagcgatggttagcaaaggtgaagaactgtttaccggcgttgtgccgattctggtggaactggatggtgatgtgaatggccataaatttagcgttagcggcgaaggcgaaggtgatgcgacctatggtaaactgaccctgaaatttatttgcaccaccggtaaactgccggttccgtggccgaccctggtgaccaccctgacctatggcgttcagtgctttagccgctatccggatcatatgaaacagcatgatttctttaaaagcgcgatgccggaaggctatgtgcaggaacgtaccatttttttcaaagatgatggcaactataaaacccgtgcggaagttaaatttgaaggcgataccctggtgaaccgcattgaactgaaaggtattgattttaaagaagatggcaacattctgggtcataaactggaatataattacaacagccataatgtgtatattatggccgataaacagaaaaatggcatcaaagtgaactttaaaatccgtcacaacattgaagatggtagcgtgcagctggcggatcattatcagcagaataccccgattggtgatggcccggtgctgctgccggataatcattatctgagcacccagagcgcgctgagcaaagatccgaatgaaaaacgtgatcatatggtgctgctggaatttgttaccgccgcgggcattaccctgggtatggatgaactgtataaa

SEQ ID NO: 353 - DNA, 4971 bp, synthetic construct
  misc_feature 1..4971: note = SYNTHETIC
  source 1..4971: mol_type = other DNA
atggacaaaaagtactctattggcctggatatcgggaccaacagcgtcgggtgggctgttatcaccgacgagtataaagtaccttcgaaaaagttcaaagtgctgggcaacaccgatcgccattcaatcaaaaagaacttgattggtgcgctgttgtttgactccggggaaaccgccgaggcgactcgccttaaacgtacagcacgtcgccggtacactcggcgtaagaatcgcatttgctatttgcaggaaatctttagcaacgagatggcaaaagtcgatgactcgtttttccaccgcctcgaggaaagctttctggtggaggaagacaaaaagcatgagcgtcacccgatcttcggcaacattgtcgatgaagtagcgtatcatgaaaaatacccaaccatttaccacttacgcaaaaagctggtggacagcactgacaaagctgatttgcgccttatctatttagccctggcacatatgattaagtttcgtggtcacttcctgatcgaaggagacttaaatcccgacaacagtgatgttgataaattgtttattcagcttgtccaaacttacaatcaactgttcgaggaaaacccgatcaatgcctccggtgtggatgcaaaagccattttaagtgcacgccttagcaagtcccgtcgcttagaaaaccttatcgcgcagctgcccggcgagaaaaagaatggtttgtttgggaaccttattgccttgagcttaggcctcaccccgaatttcaaaagtaatttcgatcttgcagaagacgccaaattacaactgtcgaaggatacttatgatgacgatctcgataatctgttagcgcagattggtgaccaatacgccgatctttttctggcggctaaaaatctgagcgacgccatcttgctttcggatattctccgcgttaacaccgaaatcacgaaagcgcctcttagtgccagcatgattaaacgttatgatgaacaccaccaggacctgaccttactcaaagcgttggttcgccagcaactgccagagaagtacaaagaaatcttctttgatcagtcaaagaatggttatgccggctatattgacgggggtgcaagccaagaggaattctacaaatttatcaagcctattctggagaaaatggatggcaccgaagagttattggtgaagcttaaccgtgaagacctcctgcggaaacagcgcacattcgataatggttcgatcccacaccaaatccatttgggggagttacacgctattttgcgtcgccaggaagacttttaccctttcctgaaggataaccgggagaaaattgagaagatccttacctttcgtattccgtattacgtaggccccttagcacggggtaatagccgtttcgcgtggatgacacggaagtcggaagagacgatcaccccgtggaacttcgaagaggtagtcgacaagggcgcatcagcgcagtcttttattgaacgtatgacgaatttcgataaaaacttgcccaatgagaaggtgcttccgaaacattccttgttatatgaatattttacagtttacaacgagctgaccaaggttaaatacgtgacggaaggaatgcgcaagcccgcttttcttagcggtgagcaaaaaaaggcgatcgtcgacctgttattcaaaacgaatcgtaaggtgactgtaaagcaactcaaagaagattacttcaaaaagattgagtgcttcgacagcgtcgaaatctctggggtagaggatcggtttaacgcaagtttaggtacctaccatgacctgcttaaaatcattaaggataaagacttcttagataatgaagagaacgaagatattctcgaggacatcgtcttgacgttaaccttatttgaggatcgtgaaatgattgaggaacgcctcaaaacttatgcccacctgttcgacgataaggtgatgaagcagctgaaacgtcggcgctacacaggatggggccgcttgagtcgcaaacttattaacggaatccgtgacaagcaatccggcaaaacgattctggatttcttgaagtcggacggatttgctaatcgcaacttcatgcagttgatccatgatgactccctgacttttaaagaggatattcaaaaggcgcaggttagtggtcaaggcgacagcttacacgaacacatcgcaaatttggctggttcgccggccattaaaaaggggatcctccagaccgtgaaagttgtagatgagcttgttaaggtcatgggtcgtcataagcccgaaaacatcgtgattgaaatggcgcgggagaatcaaacgacccagaaaggacaaaagaatagccgtgaacggatgaagcggatcgaggaaggcattaaagagctggggtctcaaatcttgaaggaacaccctgtggagaacactcagctccaaaatgaaaaactttacctgtactatttgcagaacggacgcgatatgtacgtggaccaagagttggatattaatcggctgagtgactacgacgttgatcatatcgtcccgcagagcttcctcaaagacgattctattgacaataaggtactgacgcgctctgataaaaaccgtggtaagtcggacaacgtgccctccgaagaggttgtgaaaaagatgaaaaattattggcgccagcttttaaacgcgaagctgatcacacaacgtaaattcgataatttgaccaaggctgaacggggtggcctgagcgagttagataaggcaggatttattaaacgccagttagtggagactcgtcaaatcaccaaacatgtcgcgcagattttggacagccggatgaacaccaagtacgatgaaaatgacaaactgatccgtgaggtgaaagtcattactctgaagtccaaattagttagtgatttccggaaggactttcaattctacaaagtccgtgaaattaataactatcatcacgcacatgacgcgtacctgaatgcagtggttgggaccgcccttatcaagaaatatcctaagctggagtcggagtttgtctatggcgactataaggtatacgatgttcgcaaaatgattgcgaaatctgagcaggagatcggtaaggcaaccgcaaaatatttcttttactcaaacattatgaatttctttaagacagaaatcactctggccaacggggagattcgcaaacgtccgttgatcgaaacaaacggcgagactggcgaaattgtttgggacaaagggcgtgatttcgcgacggtgcgcaaggtactgagcatgcctcaagtcaatattgttaagaaaaccgaagtgcagacgggcgggttttccaaggaaagcatcttacccaaacgtaattcagataaacttattgcacgcaaaaaggactgggatccgaaaaagtatggaggcttcgacagtccaaccgtagcctactctgttctcgttgtagcgaaagtagaaaagggtaaatccaagaaactgaaatctgtcaaggagttgcttggaatcaccattatggagcgtagctccttcgagaagaacccgattgactttctggaagccaaaggatataaagaggtcaagaaagatcttatcattaagctgcctaagtattcactcttcgagctggaaaatggtcgtaaacgcatgctcgcttctgccggcgagttgcagaagggcaatgaattagcacttccatcaaagtacgttaacttcctgtatttggccagccattacgagaaactgaaggggtctccagaggacaacgaacagaaacaattatttgtagagcagcacaagcattatcttgatgaaatcattgagcaaatttccgaattcagtaaacgcgtaatcctggccgatgcaaacctcgacaaggtgctgagcgcttacaataagcatcgcgacaaacctatccgtgagcaggctgaaaatatcattcacctgttcacattaacgaacctgggcgctccggccgcttttaaatatttcgacacgacaatcgaccgtaagcgctataccagtacgaaagaagtgttggatgcgacccttattcaccagtcaattacaggattatatgagacccgtatcgaccttagccaattaggtggggatttagaggctgaggctgctgccaaggaggctgctgcgaaggaagctgcagctaaagaggcagcggccaaagcacttgaggccgaagccgccgcgaaagaagccgctgctaaggaggcagccgccaaagaagcggcagctaaagcattagaaatggttagcaaaggtgaagaactgtttaccggcgttgtgccgattctggtggaactggatggtgatgtgaatggccataaatttagcgttagcggcgaaggcgaaggtgatgcgacctatggtaaactgaccctgaaatttatttgcaccaccggtaaactgccggttccgtggccgaccctggtgaccaccctgacctatggcgttcagtgctttagccgctatccggatcatatgaaacagcatgatttctttaaaagcgcgatgccggaaggctatgtgcaggaacgtaccatttttttcaaagatgatggcaactataaaacccgtgcggaagttaaatttgaaggcgataccctggtgaaccgcattgaactgaaaggtattgattttaaagaagatggcaacattctgggtcataaactggaatataattacaacagccataatgtgtatattatggccgataaacagaaaaatggcatcaaagtgaactttaaaatccgtcacaacattgaagatggtagcgtgcagctggcggatcattatcagcagaataccccgattggtgatggcccggtgctgctgccggataatcattatctgagcacccagagcgcgctgagcaaagatccgaatgaaaaacgtgatcatatggtgctgctggaatttgttaccgccgcgggcattaccctgggtatggatgaactgtataaa

SEQ ID NO: 354 - DNA, 4830 bp, synthetic construct
  misc_feature 1..4830: note = SYNTHETIC
  source 1..4830: mol_type = other DNA
atggacaaaaagtactctattggcctggatatcgggaccaacagcgtcgggtgggctgttatcaccgacgagtataaagtaccttcgaaaaagttcaaagtgctgggcaacaccgatcgccattcaatcaaaaagaacttgattggtgcgctgttgtttgactccggggaaaccgccgaggcgactcgccttaaacgtacagcacgtcgccggtacactcggcgtaagaatcgcatttgctatttgcaggaaatctttagcaacgagatggcaaaagtcgatgactcgtttttccaccgcctcgaggaaagctttctggtggaggaagacaaaaagcatgagcgtcacccgatcttcggcaacattgtcgatgaagtagcgtatcatgaaaaatacccaaccatttaccacttacgcaaaaagctggtggacagcactgacaaagctgatttgcgccttatctatttagccctggcacatatgattaagtttcgtggtcacttcctgatcgaaggagacttaaatcccgacaacagtgatgttgataaattgtttattcagcttgtccaaacttacaatcaactgttcgaggaaaacccgatcaatgcctccggtgtggatgcaaaagccattttaagtgcacgccttagcaagtcccgtcgcttagaaaaccttatcgcgcagctgcccggcgagaaaaagaatggtttgtttgggaaccttattgccttgagcttaggcctcaccccgaatttcaaaagtaatttcgatcttgcagaagacgccaaattacaactgtcgaaggatacttatgatgacgatctcgataatctgttagcgcagattggtgaccaatacgccgatctttttctggcggctaaaaatctgagcgacgccatcttgctttcggatattctccgcgttaacaccgaaatcacgaaagcgcctcttagtgccagcatgattaaacgttatgatgaacaccaccaggacctgaccttactcaaagcgttggttcgccagcaactgccagagaagtacaaagaaatcttctttgatcagtcaaagaatggttatgccggctatattgacgggggtgcaagccaagaggaattctacaaatttatcaagcctattctggagaaaatggatggcaccgaagagttattggtgaagcttaaccgtgaagacctcctgcggaaacagcgcacattcgataatggttcgatcccacaccaaatccatttgggggagttacacgctattttgcgtcgccaggaagacttttaccctttcctgaaggataaccgggagaaaattgagaagatccttacctttcgtattccgtattacgtaggccccttagcacggggtaatagccgtttcgcgtggatgacacggaagtcggaagagacgatcaccccgtggaacttcgaagaggtagtcgacaagggcgcatcagcgcagtcttttattgaacgtatgacgaatttcgataaaaacttgcccaatgagaaggtgcttccgaaacattccttgttatatgaatattttacagtttacaacgagctgaccaaggttaaatacgtgacggaaggaatgcgcaagcccgcttttcttagcggtgagcaaaaaaaggcgatcgtcgacctgttattcaaaacgaatcgtaaggtgactgtaaagcaactcaaagaagattacttcaaaaagattgagtgcttcgacagcgtcgaaatctctggggtagaggatcggtttaacgcaagtttaggtacctaccatgacctgcttaaaatcattaaggataaagacttcttagataatgaagagaacgaagatattctcgaggacatcgtcttgacgttaaccttatttgaggatcgtgaaatgattgaggaacgcctcaaaacttatgcccacctgttcgacgataaggtgatgaagcagctgaaacgtcggcgctacacaggatggggccgcttgagtcgcaaacttattaacggaatccgtgacaagcaatccggcaaaacgattctggatttcttgaagtcggacggatttgctaatcgcaacttcatgcagttgatccatgatgactccctgacttttaaagaggatattcaaaaggcgcaggttagtggtcaaggcgacagcttacacgaacacatcgcaaatttggctggttcgccggccattaaaaaggggatcctccagaccgtgaaagttgtagatgagcttgttaaggtcatgggtcgtcataagcccgaaaacatcgtgattgaaatggcgcgggagaatcaaacgacccagaaaggacaaaagaatagccgtgaacggatgaagcggatcgaggaaggcattaaagagctggggtctcaaatcttgaaggaacaccctgtggagaacactcagctccaaaatgaaaaactttacctgtactatttgcagaacggacgcgatatgtacgtggaccaagagttggatattaatcggctgagtgactacgacgttgatcatatcgtcccgcagagcttcctcaaagacgattctattgacaataaggtactgacgcgctctgataaaaaccgtggtaagtcggacaacgtgccctccgaagaggttgtgaaaaagatgaaaaattattggcgccagcttttaaacgcgaagctgatcacacaacgtaaattcgataatttgaccaaggctgaacggggtggcctgagcgagttagataaggcaggatttattaaacgccagttagtggagactcgtcaaatcaccaaacatgtcgcgcagattttggacagccggatgaacaccaagtacgatgaaaatgacaaactgatccgtgaggtgaaagtcattactctgaagtccaaattagttagtgatttccggaaggactttcaattctacaaagtccgtgaaattaataactatcatcacgcacatgacgcgtacctgaatgcagtggttgggaccgcccttatcaagaaatatcctaagctggagtcggagtttgtctatggcgactataaggtatacgatgttcgcaaaatgattgcgaaatctgagcaggagatcggtaaggcaaccgcaaaatatttcttttactcaaacattatgaatttctttaagacagaaatcactctggccaacggggagattcgcaaacgtccgttgatcgaaacaaacggcgagactggcgaaattgtttgggacaaagggcgtgatttcgcgacggtgcgcaaggtactgagcatgcctcaagtcaatattgttaagaaaaccgaagtgcagacgggcgggttttccaaggaaagcatcttacccaaacgtaattcagataaacttattgcacgcaaaaaggactgggatccgaaaaagtatggaggcttcgacagtccaaccgtagcctactctgttctcgttgtagcgaaagtagaaaagggtaaatccaagaaactgaaatctgtcaaggagttgcttggaatcaccattatggagcgtagctccttcgagaagaacccgattgactttctggaagccaaaggatataaagaggtcaagaaagatcttatcattaagctgcctaagtattcactcttcgagctggaaaatggtcgtaaacgcatgctcgcttctgccggcgagttgcagaagggcaatgaattagcacttccatcaaagtacgttaacttcctgtatttggccagccattacgagaaactgaaggggtctccagaggacaacgaacagaaacaattatttgtagagcagcacaagcattatcttgatgaaatcattgagcaaatttccgaattcagtaaacgcgtaatcctggccgatgcaaacctcgacaaggtgctgagcgcttacaataagcatcgcgacaaacctatccgtgagcaggctgaaaatatcattcacctgttcacattaacgaacctgggcgctccggccgcttttaaatatttcgacacgacaatcgaccgtaagcgctataccagtacgaaagaagtgttggatgcgacccttattcaccagtcaattacaggattatatgagacccgtatcgaccttagccaattaggtggggatgcacctgcgatggttagcaaaggtgaagaactgtttaccggcgttgtgccgattctggtggaactggatggtgatgtgaatggccataaatttagcgttagcggcgaaggcgaaggtgatgcgacctatggtaaactgaccctgaaatttatttgcaccaccggtaaactgccggttccgtggccgaccctggtgaccaccctgacctatggcgttcagtgctttagccgctatccggatcatatgaaacagcatgatttctttaaaagcgcgatgccggaaggctatgtgcaggaacgtaccatttttttcaaagatgatggcaactataaaacccgtgcggaagttaaatttgaaggcgataccctggtgaaccgcattgaactgaaaggtattgattttaaagaagatggcaacattctgggtcataaactggaatataattacaacagccataatgtgtatattatggccgataaacagaaaaatggcatcaaagtgaactttaaaatccgtcacaacattgaagatggtagcgtgcagctggcggatcattatcagcagaataccccgattggtgatggcccggtgctgctgccggataatcattatctgagcacccagagcgcgctgagcaaagatccgaatgaaaaacgtgatcatatggtgctgctggaatttgttaccgccgcgggcattaccctgggtatggatgaactgtataaa

SEQ ID NO: 355 - DNA, 4836 bp, synthetic construct
  misc_feature 1..4836: note = SYNTHETIC
  source 1..4836: mol_type = other DNA
atggacaaaaagtactctattggcctggatatcgggaccaacagcgtcgggtgggctgttatcaccgacgagtataaagtaccttcgaaaaagttcaaagtgctgggcaacaccgatcgccattcaatcaaaaagaacttgattggtgcgctgttgtttgactccggggaaaccgccgaggcgactcgccttaaacgtacagcacgtcgccggtacactcggcgtaagaatcgcatttgctatttgcaggaaatctttagcaacgagatggcaaaagtcgatgactcgtttttccaccgcctcgaggaaagctttctggtggaggaagacaaaaagcatgagcgtcacccgatcttcggcaacattgtcgatgaagtagcgtatcatgaaaaatacccaaccatttaccacttacgcaaaaagctggtggacagcactgacaaagctgatttgcgccttatctatttagccctggcacatatgattaagtttcgtggtcacttcctgatcgaaggagacttaaatcccgacaacagtgatgttgataaattgtttattcagcttgtccaaacttacaatcaactgttcgaggaaaacccgatcaatgcctccggtgtggatgcaaaagccattttaagtgcacgccttagcaagtcccgtcgcttagaaaaccttatcgcgcagctgcccggcgagaaaaagaatggtttgtttgggaaccttattgccttgagcttaggcctcaccccgaatttcaaaagtaatttcgatcttgcagaagacgccaaattacaactgtcgaaggatacttatgatgacgatctcgataatctgttagcgcagattggtgaccaatacgccgatctttttctggcggctaaaaatctgagcgacgccatcttgctttcggatattctccgcgttaacaccgaaatcacgaaagcgcctcttagtgccagcatgattaaacgttatgatgaacaccaccaggacctgaccttactcaaagcgttggttcgccagcaactgccagagaagtacaaagaaatcttctttgatcagtcaaagaatggttatgccggctatattgacgggggtgcaagccaagaggaattctacaaatttatcaagcctattctggagaaaatggatggcaccgaagagttattggtgaagcttaaccgtgaagacctcctgcggaaacagcgcacattcgataatggttcgatcccacaccaaatccatttgggggagttacacgctattttgcgtcgccaggaagacttttaccctttcctgaaggataaccgggagaaaattgagaagatccttacctttcgtattccgtattacgtaggccccttagcacggggtaatagccgtttcgcgtggatgacacggaagtcggaagagacgatcaccccgtggaacttcgaagaggtagtcgacaagggcgcatcagcgcagtcttttattgaacgtatgacgaatttcgataaaaacttgcccaatgagaaggtgcttccgaaacattccttgttatatgaatattttacagtttacaacgagctgaccaaggttaaatacgtgacggaaggaatgcgcaagcccgcttttcttagcggtgagcaaaaaaaggcgatcgtcgacctgttattcaaaacgaatcgtaaggtgactgtaaagcaactcaaagaagattacttcaaaaagattgagtgcttcgacagcgtcgaaatctctggggtagaggatcggtttaacgcaagtttaggtacctaccatgacctgcttaaaatcattaaggataaagacttcttagataatgaagagaacgaagatattctcgaggacatcgtcttgacgttaaccttatttgaggatcgtgaaatgattgaggaacgcctcaaaacttatgcccacctgttcgacgataaggtgatgaagcagctgaaacgtcggcgctacacaggatggggccgcttgagtcgcaaacttattaacggaatccgtgacaagcaatccggcaaaacgattctggatttcttgaagtcggacggatttgctaatcgcaacttcatgcagttgatccatgatgactccctgacttttaaagaggatattcaaaaggcgcaggttagtggtcaaggcgacagcttacacgaacacatcgcaaatttggctggttcgccggccattaaaaaggggatcctccagaccgtgaaagttgtagatgagcttgttaaggtcatgggtcgtcataagcccgaaaacatcgtgattgaaatggcgcgggagaatcaaacgacccagaaaggacaaaagaatagccgtgaacggatgaagcggatcgaggaaggcattaaagagctggggtctcaaatcttgaaggaacaccctgtggagaacactcagctccaaaatgaaaaactttacctgtactatttgcagaacggacgcgatatgtacgtggaccaagagttggatattaatcggctgagtgactacgacgttgatcatatcgtcccgcagagcttcctcaaagacgattctattgacaataaggtactgacgcgctctgataaaaaccgtggtaagtcggacaacgtgccctccgaagaggttgtgaaaaagatgaaaaattattggcgccagcttttaaacgcgaagctgatcacacaacgtaaattcgataatttgaccaaggctgaacggggtggcctgagcgagttagataaggcaggatttattaaacgccagttagtggagactcgtcaaatcaccaaacatgtcgcgcagattttggacagccggatgaacaccaagtacgatgaaaatgacaaactgatccgtgaggtgaaagtcattactctgaagtccaaattagttagtgatttccggaaggactttcaattctacaaagtccgtgaaattaataactatcatcacgcacatgacgcgtacctgaatgcagtggttgggaccgcccttatcaagaaatatcctaagctggagtcggagtttgtctatggcgactataaggtatacgatgttcgcaaaatgattgcgaaatctgagcaggagatcggtaaggcaaccgcaaaatatttcttttactcaaacattatgaatttctttaagacagaaatcactctggccaacggggagattcgcaaacgtccgttgatcgaaacaaacggcgagactggcgaaattgtttgggacaaagggcgtgatttcgcgacggtgcgcaaggtactgagcatgcctcaagtcaatattgttaagaaaaccgaagtgcagacgggcgggttttccaaggaaagcatcttacccaaacgtaattcagataaacttattgcacgcaaaaaggactgggatccgaaaaagtatggaggcttcgacagtccaaccgtagcctactctgttctcgttgtagcgaaagtagaaaagggtaaatccaagaaactgaaatctgtcaaggagttgcttggaatcaccattatggagcgtagctccttcgagaagaacccgattgactttctggaagccaaaggatataaagaggtcaagaaagatcttatcattaagctgcctaagtattcactcttcgagctggaaaatggtcgtaaacgcatgctcgcttctgccggcgagttgcagaagggcaatgaattagcacttccatcaaagtacgttaacttcctgtatttggccagccattacgagaaactgaaggggtctccagaggacaacgaacagaaacaattatttgtagagcagcacaagcattatcttgatgaaatcattgagcaaatttccgaattcagtaaacgcgtaatcctggccgatgcaaacctcgacaaggtgctgagcgcttacaataagcatcgcgacaaacctatccgtgagcaggctgaaaatatcattcacctgttcacattaacgaacctgggcgctccggccgcttttaaatatttcgacacgacaatcgaccgtaagcgctataccagtacgaaagaagtgttggatgcgacccttattcaccagtcaattacaggattatatgagacccgtatcgaccttagccaattaggtggggatgctcctgcacctgcgatggttagcaaaggtgaagaactgtttaccggcgttgtgccgattctggtggaactggatggtgatgtgaatggccataaatttagcgttagcggcgaaggcgaaggtgatgcgacctatggtaaactgaccctgaaatttatttgcaccaccggtaaactgccggttccgtggccgaccctggtgaccaccctgacctatggcgttcagtgctttagccgctatccggatcatatgaaacagcatgatttctttaaaagcgcgatgccggaaggctatgtgcaggaacgtaccatttttttcaaagatgatggcaactataaaacccgtgcggaagttaaatttgaaggcgataccctggtgaaccgcattgaactgaaaggtattgattttaaagaagatggcaacattctgggtcataaactggaatataattacaacagccataatgtgtatattatggccgataaacagaaaaatggcatcaaagtgaactttaaaatccgtcacaacattgaagatggtagcgtgcagctggcggatcattatcagcagaataccccgattggtgatggcccggtgctgctgccggataatcattatctgagcacccagagcgcgctgagcaaagatccgaatgaaaaacgtgatcatatggtgctgctggaatttgttaccgccgcgggcattaccctgggtatggatgaactgtataaa

SEQ ID NO: 356 - DNA, 4842 bp, synthetic construct
  misc_feature 1..4842: note = SYNTHETIC
  source 1..4842: mol_type = other DNA
atggacaaaaagtactctattggcctggatatcgggaccaacagcgtcgggtgggctgttatcaccgacgagtataaagtaccttcgaaaaagttcaaagtgctgggcaacaccgatcgccattcaatcaaaaagaacttgattggtgcgctgttgtttgactccggggaaaccgccgaggcgactcgccttaaacgtacagcacgtcgccggtacactcggcgtaagaatcgcatttgctatttgcaggaaatctttagcaacgagatggcaaaagtcgatgactcgtttttccaccgcctcgaggaaagctttctggtggaggaagacaaaaagcatgagcgtcacccgatcttcggcaacattgtcgatgaagtagcgtatcatgaaaaatacccaaccatttaccacttacgcaaaaagctggtggacagcactgacaaagctgatttgcgccttatctatttagccctggcacatatgattaagtttcgtggtcacttcctgatcgaaggagacttaaatcccgacaacagtgatgttgataaattgtttattcagcttgtccaaacttacaatcaactgttcgaggaaaacccgatcaatgcctccggtgtggatgcaaaagccattttaagtgcacgccttagcaagtcccgtcgcttagaaaaccttatcgcgcagctgcccggcgagaaaaagaatggtttgtttgggaaccttattgccttgagcttaggcctcaccccgaatttcaaaagtaatttcgatcttgcagaagacgccaaattacaactgtcgaaggatacttatgatgacgatctcgataatctgttagcgcagattggtgaccaatacgccgatctttttctggcggctaaaaatctgagcgacgccatcttgctttcggatattctccgcgttaacaccgaaatcacgaaagcgcctcttagtgccagcatgattaaacgttatgatgaacaccaccaggacctgaccttactcaaagcgttggttcgccagcaactgccagagaagtacaaagaaatcttctttgatcagtcaaagaatggttatgccggctatattgacgggggtgcaagccaagaggaattctacaaatttatcaagcctattctggagaaaatggatggcaccgaagagttattggtgaagcttaaccgtgaagacctcctgcggaaacagcgcacattcgataatggttcgatcccacaccaaatccatttgggggagttacacgctattttgcgtcgccaggaagacttttaccctttcctgaaggataaccgggagaaaattgagaagatccttacctttcgtattccgtattacgtaggccccttagcacggggtaatagccgtttcgcgtggatgacacggaagtcggaagagacgatcaccccgtggaacttcgaagaggtagtcgacaagggcgcatcagcgcagtcttttattgaacgtatgacgaatttcgataaaaacttgcccaatgagaaggtgcttccgaaacattccttgttatatgaatattttacagtttacaacgagctgaccaaggttaaatacgtgacggaaggaatgcgcaagcccgcttttcttagcggtgagcaaaaaaaggcgatcgtcgacctgttattcaaaacgaatcgtaaggtgactgtaaagcaactcaaagaagattacttcaaaaagattgagtgcttcgacagcgtcgaaatctctggggtagaggatcggtttaacgcaagtttaggtacctaccatgacctgcttaaaatcattaaggataaagacttcttagataatgaagagaacgaagatattctcgaggacatcgtcttgacgttaaccttatttgaggatcgtgaaatgattgaggaacgcctcaaaacttatgcccacctgttcgacgataaggtgatgaagcagctgaaacgtcggcgctacacaggatggggccgcttgagtcgcaaacttattaacggaatccgtgacaagcaatccggcaaaacgattctggatttcttgaagtcggacggatttgctaatcgcaacttcatgcagttgatccatgatgactccctgacttttaaagaggatattcaaaaggcgcaggttagtggtcaaggcgacagcttacacgaacacatcgcaaatttggctggttcgccggccattaaaaaggggatcctccagaccgtgaaagttgtagatgagcttgttaaggtcatgggtcgtcataagcccgaaaacatcgtgattgaaatggcgcgggagaatcaaacgacccagaaaggacaaaagaatagccgtgaacggatgaagcggatcgaggaaggcattaaagagctggggtctcaaatcttgaaggaacaccctgtggagaacactcagctccaaaatgaaaaactttacctgtactatttgcagaacggacgcgatatgtacgtggaccaagagttggatattaatcggctgagtgactacgacgttgatcatatcgtcccgcagagcttcctcaaagacgattctattgacaataaggtactgacgcgctctgataaaaaccgtggtaagtcggacaacgtgccctccgaagaggttgtgaaaaagatgaaaaattattggcgccagcttttaaacgcgaagctgatcacacaacgtaaattcgataatttgaccaaggctgaacggggtggcctgagcgagttagataaggcaggatttattaaacgccagttagtggagactcgtcaaatcaccaaacatgtcgcgcagattttggacagccggatgaacaccaagtacgatgaaaatgacaaactgatccgtgaggtgaaagtcattactctgaagtccaaattagttagtgatttccggaaggactttcaattctacaaagtccgtgaaattaataactatcatcacgcacatgacgcgtacctgaatgcagtggttgggaccgcccttatcaagaaatatcctaagctggagtcggagtttgtctatggcgactataaggtatacgatgttcgcaaaatgattgcgaaatctgagcaggagatcggtaaggcaaccgcaaaatatttcttttactcaaacattatgaatttctttaagacagaaatcactctggccaacggggagattcgcaaacgtccgttgatcgaaacaaacggcgagactggcgaaattgtttgggacaaagggcgtgatttcgcgacggtgcgcaaggtactgagcatgcctcaagtcaatattgttaagaaaaccgaagtgcagacgggcgggttttccaaggaaagcatcttacccaaacgtaattcagataaacttattgcacgcaaaaaggactgggatccgaaaaagtatggaggcttcgacagtccaaccgtagcctactctgttctcgttgtagcgaaagtagaaaagggtaaatccaagaaactgaaatctgtcaaggagttgcttggaatcaccattatggagcgtagctccttcgagaagaacccgattgactttctggaagccaaaggatataaagaggtcaagaaagatcttatcattaagctgcctaagtattcactcttcgagctggaaaatggtcgtaaacgcatgctcgcttctgccggcgagttgcagaagggcaatgaattagcacttccatcaaagtacgttaacttcctgtatttggccagccattacgagaaactgaaggggtctccagaggacaacgaacagaaacaattatttgtagagcagcacaagcattatcttgatgaaatcattgagcaaatttccgaattcagtaaacgcgtaatcctggccgatgcaaacctcgacaaggtgctgagcgcttacaataagcatcgcgacaaacctatccgtgagcaggctgaaaatatcattcacctgttcacattaacgaacctgggcgctccggccgcttttaaatatttcgacacgacaatcgaccgtaagcgctataccagtacgaaagaagtgttggatgcgacccttattcaccagtcaattacaggattatatgagacccgtatcgaccttagccaattaggtggggatgcgccagctcctgcacctgcgatggttagcaaaggtgaagaactgtttaccggcgttgtgccgattctggtggaactggatggtgatgtgaatggccataaatttagcgttagcggcgaaggcgaaggtgatgcgacctatggtaaactgaccctgaaatttatttgcaccaccggtaaactgccggttccgtggccgaccctggtgaccaccctgacctatggcgttcagtgctttagccgctatccggatcatatgaaacagcatgatttctttaaaagcgcgatgccggaaggctatgtgcaggaacgtaccatttttttcaaagatgatggcaactataaaacccgtgcggaagttaaatttgaaggcgataccctggtgaaccgcattgaactgaaaggtattgattttaaagaagatggcaacattctgggtcataaactggaatataattacaacagccataatgtgtatattatggccgataaacagaaaaatggcatcaaagtgaactttaaaatccgtcacaacattgaagatggtagcgtgcagctggcggatcattatcagcagaataccccgattggtgatggcccggtgctgctgccggataatcattatctgagcacccagagcgcgctgagcaaagatccgaatgaaaaacgtgatcatatggtgctgctggaatttgttaccgccgcgggcattaccctgggtatggatgaactgtataaa

SEQ ID NO: 357 - DNA, 4848 bp, synthetic construct
  misc_feature 1..4848: note = SYNTHETIC
  source 1..4848: mol_type = other DNA
atggacaaaaagtactctattggcctggatatcgggaccaacagcgtcgggtgggctgttatcaccgacgagtataaagtaccttcgaaaaagttcaaagtgctgggcaacaccgatcgccattcaatcaaaaagaacttgattggtgcgctgttgtttgactccggggaaaccgccgaggcgactcgccttaaacgtacagcacgtcgccggtacactcggcgtaagaatcgcatttgctatttgcaggaaatctttagcaacgagatggcaaaagtcgatgactcgtttttccaccgcctcgaggaaagctttctggtggaggaagacaaaaagcatgagcgtcacccgatcttcggcaacattgtcgatgaagtagcgtatcatgaaaaatacccaaccatttaccacttacgcaaaaagctggtggacagcactgacaaagctgatttgcgccttatctatttagccctggcacatatgattaagtttcgtggtcacttcctgatcgaaggagacttaaatcccgacaacagtgatgttgataaattgtttattcagcttgtccaaacttacaatcaactgttcgaggaaaacccgatcaatgcctccggtgtggatgcaaaagccattttaagtgcacgccttagcaagtcccgtcgcttagaaaaccttatcgcgcagctgcccggcgagaaaaagaatggtttgtttgggaaccttattgccttgagcttaggcctcaccccgaatttcaaaagtaatttcgatcttgcagaagacgccaaattacaactgtcgaaggatacttatgatgacgatctcgataatctgttagcgcagattggtgaccaatacgccgatctttttctggcggctaaaaatctgagcgacgccatcttgctttcggatattctccgcgttaacaccgaaatcacgaaagcgcctcttagtgccagcatgattaaacgttatgatgaacaccaccaggacctgaccttactcaaagcgttggttcgccagcaactgccagagaagtacaaagaaatcttctttgatcagtcaaagaatggttatgccggctatattgacgggggtgcaagccaagaggaattctacaaatttatcaagcctattctggagaaaatggatggcaccgaagagttattggtgaagcttaaccgtgaagacctcctgcggaaacagcgcacattcgataatggttcgatcccacaccaaatccatttgggggagttacacgctattttgcgtcgccaggaagacttttaccctttcctgaaggataaccgggagaaaattgagaagatccttacctttcgtattccgtattacgtaggccccttagcacggggtaatagccgtttcgcgtggatgacacggaagtcggaagagacgatcaccccgtggaacttcgaagaggtagtcgacaagggcgcatcagcgcagtcttttattgaacgtatgacgaatttcgataaaaacttgcccaatgagaaggtgcttccgaaacattccttgttatatgaatattttacagtttacaacgagctgaccaaggttaaatacgtgacggaaggaatgcgcaagcccgcttttcttagcggtgagcaaaaaaaggcgatcgtcgacctgttattcaaaacgaatcgtaaggtgactgtaaagcaactcaaagaagattacttcaaaaagattgagtgcttcgacagcgtcgaaatctctggggtagaggatcggtttaacgcaagtttaggtacctaccatgacctgcttaaaatcattaaggataaagacttcttagataatgaagagaacgaagatattctcgaggacatcgtcttgacgttaaccttatttgaggatcgtgaaatgattgaggaacgcctcaaaacttatgcccacctgttcgacgataaggtgatgaagcagctgaaacgtcggcgctacacaggatggggccgcttgagtcgcaaacttattaacggaatccgtgacaagcaatccggcaaaacgattctggatttcttgaagtcggacggatttgctaatcgcaacttcatgcagttgatccatgatgactccctgacttttaaagaggatattcaaaaggcgcaggttagtggtcaaggcgacagcttacacgaacacatcgcaaatttggctggttcgccggccattaaaaaggggatcctccagaccgtgaaagttgtagatgagcttgttaaggtcatgggtcgtcataagcccgaaaacatcgtgattgaaatggcgcgggagaatcaaacgacccagaaaggacaaaagaatagccgtgaacggatgaagcggatcgaggaaggcattaaagagctggggtctcaaatcttgaaggaacaccctgtggagaacactcagctccaaaatgaaaaactttacctgtactatttgcagaacggacgcgatatgtacgtggaccaagagttggatattaatcggctgagtgactacgacgttgatcatatcgtcccgcagagcttcctcaaagacgattctattgacaataaggtactgacgcgctctgataaaaaccgtggtaagtcggacaacgtgccctccgaagaggttgtgaaaaagatgaaaaattattggcgccagcttttaaacgcgaagctgatcacacaacgtaaattcgataatttgaccaaggctgaacggggtggcctgagcgagttagataaggcaggatttattaaacgccagttagtggagactcgtcaaatcaccaaacatgtcgcgcagattttggacagccggatgaacaccaagtacgatgaaaatgacaaactgatccgtgaggtgaaagtcattactctgaagtccaaattagttagtgatttccggaaggactttcaattctacaaagtccgtgaaattaataactatcatcacgcacatgacgcgtacctgaatgcagtggttgggaccgcccttatcaagaaatatcctaagctggagtcggagtttgtctatggcgactataaggtatacgatgttcgcaaaatgattgcgaaatctgagcaggagatcggtaaggcaaccgcaaaatatttcttttactcaaacattatgaatttctttaagacagaaatcactctggccaacggggagattcgcaaacgtccgttgatcgaaacaaacggcgagactggcgaaattgtttgggacaaagggcgtgatttcgcgacggtgcgcaaggtactgagcatgcctcaagtcaatattgttaagaaaaccgaagtgcagacgggcgggttttccaaggaaagcatcttacccaaacgtaattcagataaacttattgcacgcaaaaaggactgggatccgaaaaagtatggaggcttcgacagtccaaccgtagcctactctgttctcgttgtagcgaaagtagaaaagggtaaatccaagaaactgaaatctgtcaaggagttgcttggaatcaccattatggagcgtagctccttcgagaagaacccgattgactttctggaagccaaaggatataaagaggtcaagaaagatcttatcattaagctgcctaagtattcactcttcgagctggaaaatggtcgtaaacgcatgctcgcttctgccggcgagttgcagaagggcaatgaattagcacttccatcaaagtacgttaacttcctgtatttggccagccattacgagaaactgaaggggtctccagaggacaacgaacagaaacaattatttgtagagcagcacaagcattatcttgatgaaatcattgagcaaatttccgaattcagtaaacgcgtaatcctggccgatgcaaacctcgacaaggtgctgagcgcttacaataagcatcgcgacaaacctatccgtgagcaggctgaaaatatcattcacctgttcacattaacgaacctgggcgctccggccgcttttaaatatttcgacacgacaatcgaccgtaagcgctataccagtacgaaagaagtgttggatgcgacccttattcaccagtcaattacaggattatatgagacccgtatcgaccttagccaattaggtggggatgctcctgcgccagctcctgcacctgcgatggttagcaaaggtgaagaactgtttaccggcgttgtgccgattctggtggaactggatggtgatgtgaatggccataaatttagcgttagcggcgaaggcgaaggtgatgcgacctatggtaaactgaccctgaaatttatttgcaccaccggtaaactgccggttccgtggccgaccctggtgaccaccctgacctatggcgttcagtgctttagccgctatccggatcatatgaaacagcatgatttctttaaaagcgcgatgccggaaggctatgtgcaggaacgtaccatttttttcaaagatgatggcaactataaaacccgtgcggaagttaaatttgaaggcgataccctggtgaaccgcattgaactgaaaggtattgattttaaagaagatggcaacattctgggtcataaactggaatataattacaacagccataatgtgtatattatggccgataaacagaaaaatggcatcaaagtgaactttaaaatccgtcacaacattgaagatggtagcgtgcagctggcggatcattatcagcagaataccccgattggtgatggcccggtgctgctgccggataatcattatctgagcacccagagcgcgctgagcaaagatccgaatgaaaaacgtgatcatatggtgctgctggaatttgttaccgccgcgggcattaccctgggtatggatgaactgtataaa

SEQ ID NO: 358 - DNA, 4854 bp, synthetic construct
  misc_feature 1..4854: note = SYNTHETIC
  source 1..4854: mol_type = other DNA
atggacaaaaagtactctattggcctggatatcgggaccaacagcgtcgggtgggctgttatcaccgacgagtataaagtaccttcgaaaaagttcaaagtgctgggcaacaccgatcgccattcaatcaaaaagaacttgattggtgcgctgttgtttgactccggggaaaccgccgaggcgactcgccttaaacgtacagcacgtcgccggtacactcggcgtaagaatcgcatttgctatttgcaggaaatctttagcaacgagatggcaaaagtcgatgactcgtttttccaccgcctcgaggaaagctttctggtggaggaagacaaaaagcatgagcgtcacccgatcttcggcaacattgtcgatgaagtagcgtatcatgaaaaatacccaaccatttaccacttacgcaaaaagctggtggacagcactgacaaagctgatttgcgccttatctatttagccctggcacatatgattaagtttcgtggtcacttcctgatcgaaggagacttaaatcccgacaacagtgatgttgataaattgtttattcagcttgtccaaacttacaatcaactgttcgaggaaaacccgatcaatgcctccggtgtggatgcaaaagccattttaagtgcacgccttagcaagtcccgtcgcttagaaaaccttatcgcgcagctgcccggcgagaaaaagaatggtttgtttgggaaccttattgccttgagcttaggcctcaccccgaatttcaaaagtaatttcgatcttgcagaagacgccaaattacaactgtcgaaggatacttatgatgacgatctcgataatctgttagcgcagattggtgaccaatacgccgatctttttctggcggctaaaaatctgagcgacgccatcttgctttcggatattctccgcgttaacaccgaaatcacgaaagcgcctcttagtgccagcatgattaaacgttatgatgaacaccaccaggacctgaccttactcaaagcgttggttcgccagcaactgccagagaagtacaaagaaatcttctttgatcagtcaaagaatggttatgccggctatattgacgggggtgcaagccaagaggaattctacaaatttatcaagcctattctggagaaaatggatggcaccgaagagttattggtgaagcttaaccgtgaagacctcctgcggaaacagcgcacattcgataatggttcgatcccacaccaaatccatttgggggagttacacgctattttgcgtcgccaggaagacttttaccctttcctgaaggataaccgggagaaaattgagaagatccttacctttcgtattccgtattacgtaggccccttagcacggggtaatagccgtttcgcgtggatgacacggaagtcggaagagacgatcaccccgtggaacttcgaagaggtagtcgacaagggcgcatcagcgcagtcttttattgaacgtatgacgaatttcgataaaaacttgcccaatgagaaggtgcttccgaaacattccttgttatatgaatattttacagtttacaacgagctgaccaaggttaaatacgtgacggaaggaatgcgcaagcccgcttttcttagcggtgagcaaaaaaaggcgatcgtcgacctgttattcaaaacgaatcgtaaggtgactgtaaagcaactcaaagaagattacttcaaaaagattgagtgcttcgacagcgtcgaaatctctggggtagaggatcggtttaacgcaagtttaggtacctaccatgacctgcttaaaatcattaaggataaagacttcttagataatgaagagaacgaagatattctcgaggacatcgtcttgacgttaaccttatttgaggatcgtgaaatgattgaggaacgcctcaaaacttatgcccacctgttcgacgataaggtgatgaagcagctgaaacgtcggcgctacacaggatggggccgcttgagtcgcaaacttattaacggaatccgtgacaagcaatccggcaaaacgattctggatttcttgaagtcggacggatttgctaatcgcaacttcatgcagttgatccatgatgactccctgacttttaaagaggatattcaaaaggcgcaggttagtggtcaaggcgacagcttacacgaacacatcgcaaatttggctggttcgccggccattaaaaaggggatcctccagaccgtgaaagttgtagatgagcttgttaaggtcatgggtcgtcataagcccgaaaacatcgtgattgaaatggcgcgggagaatcaaacgacccagaaaggacaaaagaatagccgtgaacggatgaagcggatcgaggaaggcattaaagagctggggtctcaaatcttgaaggaacaccctgtggagaacactcagctccaaaatgaaaaactttacctgtactatttgcagaacggacgcgatatgtacgtggaccaagagttggatattaatcggctgagtgactacgacgttgatcatatcgtcccgcagagcttcctcaaagacgattctattgacaataaggtactgacgcgctctgataaaaaccgtggtaagtcggacaacgtgccctccgaagaggttgtgaaaaagatgaaaaattattggcgccagcttttaaacgcgaagctgatcacacaacgtaaattcgataatttgaccaaggctgaacggggtggcctgagcgagttagataaggcaggatttattaaacgccagttagtggagactcgtcaaatcaccaaacatgtcgcgcagattttggacagccggatgaacaccaagtacgatgaaaatgacaaactgatccgtgaggtgaaagtcattactctgaagtccaaattagttagtgatttccggaaggactttcaattctacaaagtccgtgaaattaataactatcatcacgcacatgacgcgtacctgaatgcagtggttgggaccgcccttatcaagaaatatcctaagctggagtcggagtttgtctatggcgactataaggtatacgatgttcgcaaaatgattgcgaaatctgagcaggagatcggtaaggcaaccgcaaaatatttcttttactcaaacattatgaatttctttaagacagaaatcactctggccaacggggagattcgcaaacgtccgttgatcgaaacaaacggcgagactggcgaaattgtttgggacaaagggcgtgatttcgcgacggtgcgcaaggtactgagcatgcctcaagtcaatattgttaagaaaaccgaagtgcagacgggcgggttttccaaggaaagcatcttacccaaacgtaattcagataaacttattgcacgcaaaaaggactgggatccgaaaaagtatggaggcttcgacagtccaaccgtagcctactctgttctcgttgtagcgaaagtagaaaagggtaaatccaagaaactgaaatctgtcaaggagttgcttggaatcaccattatggagcgtagctccttcgagaagaacccgattgactttctggaagccaaaggatataaagaggtcaagaaagatcttatcattaagctgcctaagtattcactcttcgagctggaaaatggtcgtaaacgcatgctcgcttctgccggcgagttgcagaagggcaatgaattagcacttccatcaaagtacgttaacttcctgtatttggccagccattacgagaaactgaaggggtctccagaggacaacgaacagaaacaattatttgtagagcagcacaagcattatcttgatgaaatcattgagcaaatttccgaattcagtaaacgcgtaatcctggccgatgcaaacctcgacaaggtgctgagcgcttacaataagcatcgcgacaaacctatccgtgagcaggctgaaaatatcattcacctgttcacattaacgaacctgggcgctccggccgcttttaaatatttcgacacgacaatcgaccgtaagcgctataccagtacgaaagaagtgttggatgcgacccttattcaccagtcaattacaggattatatgagacccgtatcgaccttagccaattaggtggggatgcgcccgctcctgcgccagctcctgcacctgcgatggttagcaaaggtgaagaactgtttaccggcgttgtgccgattctggtggaactggatggtgatgtgaatggccataaatttagcgttagcggcgaaggcgaaggtgatgcgacctatggtaaactgaccctgaaatttatttgcaccaccggtaaactgccggttccgtggccgaccctggtgaccaccctgacctatggcgttcagtgctttagccgctatccggatcatatgaaacagcatgatttctttaaaagcgcgatgccggaaggctatgtgcaggaacgtaccatttttttcaaagatgatggcaactataaaacccgtgcggaagttaaatttgaaggcgataccctggtgaaccgcattgaactgaaaggtattgattttaaagaagatggcaacattctgggtcataaactggaatataattacaacagccataatgtgtatattatggccgataaacagaaaaatggcatcaaagtgaactttaaaatccgtcacaacattgaagatggtagcgtgcagctggcggatcattatcagcagaataccccgattggtgatggcccggtgctgctgccggataatcattatctgagcacccagagcgcgctgagcaaagatccgaatgaaaaacgtgatcatatggtgctgctggaatttgttaccgccgcgggcattaccctgggtatggatgaactgtataaa

SEQ ID NO: 359 - DNA, 4860 bp, synthetic construct
  misc_feature 1..4860: note = SYNTHETIC
  source 1..4860: mol_type = other DNA
atggacaaaaagtactctattggcctggatatcgggaccaacagcgtcgggtgggctgttatcaccgacgagtataaagtaccttcgaaaaagttcaaagtgctgggcaacaccgatcgccattcaatcaaaaagaacttgattggtgcgctgttgtttgactccggggaaaccgccgaggcgactcgccttaaacgtacagcacgtcgccggtacactcggcgtaagaatcgcatttgctatttgcaggaaatctttagcaacgagatggcaaaagtcgatgactcgtttttccaccgcctcgaggaaagctttctggtggaggaagacaaaaagcatgagcgtcacccgatcttcggcaacattgtcgatgaagtagcgtatcatgaaaaatacccaaccatttaccacttacgcaaaaagctggtggacagcactgacaaagctgatttgcgccttatctatttagccctggcacatatgattaagtttcgtggtcacttcctgatcgaaggagacttaaatcccgacaacagtgatgttgataaattgtttattcagcttgtccaaacttacaatcaactgttcgaggaaaacccgatcaatgcctccggtgtggatgcaaaagccattttaagtgcacgccttagcaagtcccgtcgcttagaaaaccttatcgcgcagctgcccggcgagaaaaagaatggtttgtttgggaaccttattgccttgagcttaggcctcaccccgaatttcaaaagtaatttcgatcttgcagaagacgccaaattacaactgtcgaaggatacttatgatgacgatctcgataatctgttagcgcagattggtgaccaatacgccgatctttttctggcggctaaaaatctgagcgacgccatcttgctttcggatattctccgcgttaacaccgaaatcacgaaagcgcctcttagtgccagcatgattaaacgttatgatgaacaccaccaggacctgaccttactcaaagcgttggttcgccagcaactgccagagaagtacaaagaaatcttctttgatcagtcaaagaatggttatgccggctatattgacgggggtgcaagccaagaggaattctacaaatttatcaagcctattctggagaaaatggatggcaccgaagagttattggtgaagcttaaccgtgaagacctcctgcggaaacagcgcacattcgataatggttcgatcccacaccaaatccatttgggggagttacacgctattttgcgtcgccaggaagacttttaccctttcctgaaggataaccgggagaaaattgagaagatccttacctttcgtattccgtattacgtaggccccttagcacggggtaatagccgtttcgcgtggatgacacggaagtcggaagagacgatcaccccgtggaacttcgaagaggtagtcgacaagggcgcatcagcgcagtcttttattgaacgtatgacgaatttcgataaaaacttgcccaatgagaaggtgcttccgaaacattccttgttatatgaatattttacagtttacaacgagctgaccaaggttaaatacgtgacggaaggaatgcgcaagcccgcttttcttagcggtgagcaaaaaaaggcgatcgtcgacctgttattcaaaacgaatcgtaaggtgactgtaaagcaactcaaagaagattacttcaaaaagattgagtgcttcgacagcgtcgaaatctctggggtagaggatcggtttaacgcaagtttaggtacctaccatgacctgcttaaaatcattaaggataaagacttcttagataatgaagagaacgaagatattctcgaggacatcgtcttgacgttaaccttatttgaggatcgtgaaatgattgaggaacgcctcaaaacttatgcccacctgttcgacgataaggtgatgaagcagctgaaacgtcggcgctacacaggatggggccgcttgagtcgcaaacttattaacggaatccgtgacaagcaatccggcaaaacgattctggatttcttgaagtcggacggatttgctaatcgcaacttcatgcagttgatccatgatgactccctgacttttaaagaggatattcaaaaggcgcaggttagtggtcaaggcgacagcttacacgaacacatcgcaaatttggctggttcgccggccattaaaaaggggatcctccagaccgtgaaagttgtagatgagcttgttaaggtcatgggtcgtcataagcccgaaaacatcgtgattgaaatggcgcgggagaatcaaacgacccagaaaggacaaaagaatagccgtgaacggatgaagcggatcgaggaaggcattaaagagctggggtctcaaatcttgaaggaacaccctgtggagaacactcagctccaaaatgaaaaactttacctgtactatttgcagaacggacgcgatatgtacgtggaccaagagttggatattaatcggctgagtgactacgacgttgatcatatcgtcccgcagagcttcctcaaagacgattctattgacaataaggtactgacgcgctctgataaaaaccgtggtaagtcggacaacgtgccctccgaagaggttgtgaaaaagatgaaaaattattggcgccagcttttaaacgcgaagctgatcacacaacgtaaattcgataatttgaccaaggctgaacggggtggcctgagcgagttagataaggcaggatttattaaacgccagttagtggagactcgtcaaatcaccaaacatgtcgcgcagattttggacagccggatgaacaccaagtacgatgaaaatgacaaactgatccgtgaggtgaaagtcattactctgaagtccaaattagttagtgatttccggaaggactttcaattctacaaagtccgtgaaattaataactatcatcacgcacatgacgcgtacctgaatgcagtggttgggaccgcccttatcaagaaatatcctaagctggagtcggagtttgtctatggcgactataaggtatacgatgttcgcaaaatgattgcgaaatctgagcaggagatcggtaaggcaaccgcaaaatatttcttttactcaaacattatgaatttctttaagacagaaatcactctggccaacggggagattcgcaaacgtccgttgatcgaaacaaacggcgagactggcgaaattgtttgggacaaagggcgtgatttcgcgacggtgcgcaaggtactgagcatgcctcaagtcaatattgttaagaaaaccgaagtgcagacgggcgggttttccaaggaaagcatcttacccaaacgtaattcagataaacttattgcacgcaaaaaggactgggatccgaaaaagtatggaggcttcgacagtccaaccgtagcctactctgttctcgttgtagcgaaagtagaaaagggtaaatccaagaaactgaaatctgtcaaggagttgcttggaatcaccattatggagcgtagctccttcgagaagaacccgattgactttctggaagccaaaggatataaagaggtcaagaaagatcttatcattaagctgcctaagtattcactcttcgagctggaaaatggtcgtaaacgcatgctcgcttctgccggcgagttgcagaagggcaatgaattagcacttccatcaaagtacgttaacttcctgtatttggccagccattacgagaaactgaaggggtctccagaggacaacgaacagaaacaattatttgtagagcagcacaagcattatcttgatgaaatcattgagcaaatttccgaattcagtaaacgcgtaatcctggccgatgcaaacctcgacaaggtgctgagcgcttacaataagcatcgcgacaaacctatccgtgagcaggctgaaaatatcattcacctgttcacattaacgaacctgggcgctccggccgcttttaaatatttcgacacgacaatcgaccgtaagcgctataccagtacgaaagaagtgttggatgcgacccttattcaccagtcaattacaggattatatgagacccgtatcgaccttagccaattaggtggggatgcgccagcgcctgctcctgcacccgctccagcacctgcgatggttagcaaaggtgaagaactgtttaccggcgttgtgccgattctggtggaactggatggtgatgtgaatggccataaatttagcgttagcggcgaaggcgaaggtgatgcgacctatggtaaactgaccctgaaatttatttgcaccaccggtaaactgccggttccgtggccgaccctggtgaccaccctgacctatggcgttcagtgctttagccgctatccggatcatatgaaacagcatgatttctttaaaagcgcgatgccggaaggctatgtgcaggaacgtaccatttttttcaaagatgatggcaactataaaacccgtgcggaagttaaatttgaaggcgataccctggtgaaccgcattgaactgaaaggtattgattttaaagaagatggcaacattctgggtcataaactggaatataattacaacagccataatgtgtatattatggccgataaacagaaaaatggcatcaaagtgaactttaaaatccgtcacaacattgaagatggtagcgtgcagctggcggatcattatcagcagaataccccgattggtgatggcccggtgctgctgccggataatcattatctgagcacccagagcgcgctgagcaaagatccgaatgaaaaacgtgatcatatggtgctgctggaatttgttaccgccgcgggcattaccctgggtatggatgaactgtataaa

SEQ ID NO: 360 - DNA, 4866 bp, synthetic construct
  misc_feature 1..4866: note = SYNTHETIC
  source 1..4866: mol_type = other DNA
atggacaaaaagtactctattggcctggatatcgggaccaacagcgtcgggtgggctgttatcaccgacgagtataaagtaccttcgaaaaagttcaaagtgctgggcaacaccgatcgccattcaatcaaaaagaacttgattggtgcgctgttgtttgactccggggaaaccgccgaggcgactcgccttaaacgtacagcacgtcgccggtacactcggcgtaagaatcgcatttgctatttgcaggaaatctttagcaacgagatggcaaaagtcgatgactcgtttttccaccgcctcgaggaaagctttctggtggaggaagacaaaaagcatgagcgtcacccgatcttcggcaacattgtcgatgaagtagcgtatcatgaaaaatacccaaccatttaccacttacgcaaaaagctggtggacagcactgacaaagctgatttgcgccttatctatttagccctggcacatatgattaagtttcgtggtcacttcctgatcgaaggagacttaaatcccgacaacagtgatgttgataaattgtttattcagcttgtccaaacttacaatcaactgttcgaggaaaacccgatcaatgcctccggtgtggatgcaaaagccattttaagtgcacgccttagcaagtcccgtcgcttagaaaaccttatcgcgcagctgcccggcgagaaaaagaatggtttgtttgggaaccttattgccttgagcttaggcctcaccccgaatttcaaaagtaatttcgatcttgcagaagacgccaaattacaactgtcgaaggatacttatgatgacgatctcgataatctgttagcgcagattggtgaccaatacgccgatctttttctggcggctaaaaatctgagcgacgccatcttgctttcggatattctccgcgttaacaccgaaatcacgaaagcgcctcttagtgccagcatgattaaacgttatgatgaacaccaccaggacctgaccttactcaaagcgttggttcgccagcaactgccagagaagtacaaagaaatcttctttgatcagtcaaagaatggttatgccggctatattgacgggggtgcaagccaagaggaattctacaaatttatcaagcctattctggagaaaatggatggcaccgaagagttattggtgaagcttaaccgtgaagacctcctgcggaaacagcgcacattcgataatggttcgatcccacaccaaatccatttgggggagttacacgctattttgcgtcgccaggaagacttttaccctttcctgaaggataaccgggagaaaattgagaagatccttacctttcgtattccgtattacgtaggccccttagcacggggtaatagccgtttcgcgtggatgacacggaagtcggaagagacgatcaccccgtggaacttcgaagaggtagtcgacaagggcgcatcagcgcagtcttttattgaacgtatgacgaatttcgataaaaacttgcccaatgagaaggtgcttccgaaacattccttgttatatgaatattttacagtttacaacgagctgaccaaggttaaatacgtgacggaaggaatgcgcaagcccgcttttcttagcggtgagcaaaaaaaggcgatcgtcgacctgttattcaaaacgaatcgtaaggtgactgtaaagcaactcaaagaagattacttcaaaaagattgagtgcttcgacagcgtcgaaatctctggggtagaggatcggtttaacgcaagtttaggtacctaccatgacctgcttaaaatcattaaggataaagacttcttagataatgaagagaacgaagatattctcgaggacatcgtcttgacgttaaccttatttgaggatcgtgaaatgattgaggaacgcctcaaaacttatgcccacctgttcgacgataaggtgatgaagcagctgaaacgtcggcgctacacaggatggggccgcttgagtcgcaaacttattaacggaatccgtgacaagcaatccggcaaaacgattctggatttcttgaagtcggacggatttgctaatcgcaacttcatgcagttgatccatgatgactccctgacttttaaagaggatattcaaaaggcgcaggttagtggtcaaggcgacagcttacacgaacacatcgcaaatttggctggttcgccggccattaaaaaggggatcctccagaccgtgaaagttgtagatgagcttgttaaggtcatgggtcgtcataagcccgaaaacatcgtgattgaaatggcgcgggagaatcaaacgacccagaaaggacaaaagaatagccgtgaacggatgaagcggatcgaggaaggcattaaagagctggggtctcaaatcttgaaggaacaccctgtggagaacactcagctccaaaatgaaaaactttacctgtactatttgcagaacggacgcgatatgtacgtggaccaagagttggatattaatcggctgagtgactacgacgttgatcatatcgtcccgcagagcttcctcaaagacgattctattgacaataaggtactgacgcgctctgataaaaaccgtggtaagtcggacaacgtgccctccgaagaggttgtgaaaaagatgaaaaattattggcgccagcttttaaacgcgaagctgatcacacaacgtaaattcgataatttgaccaaggctgaacggggtggcctgagcgagttagataaggcaggatttattaaacgccagttagtggagactcgtcaaatcaccaaacatgtcgcgcagattttggacagccggatgaacaccaagtacgatgaaaatgacaaactgatccgtgaggtgaaagtcattactctgaagtccaaattagttagtgatttccggaaggactttcaattctacaaagtccgtgaaattaataactatcatcacgcacatgacgcgtacctgaatgcagtggttgggaccgcccttatcaagaaatatcctaagctggagtcggagtttgtctatggcgactataaggtatacgatgttcgcaaaatgattgcgaaatctgagcaggagatcggtaaggcaaccgcaaaatatttcttttactcaaacattatgaatttctttaagacagaaatcactctggccaacggggagattcgcaaacgtccgttgatcgaaacaaacggcgagactggcgaaattgtttgggacaaagggcgtgatttcgcgacggtgcgcaaggtactgagcatgcctcaagtcaatattgttaagaaaaccgaagtgcagacgggcgggttttccaaggaaagcatcttacccaaacgtaattcagataaacttattgcacgcaaaaaggactgggatccgaaaaagtatggaggcttcgacagtccaaccgtagcctactctgttctcgttgtagcgaaagtagaaaagggtaaatccaagaaactgaaatctgtcaaggagttgcttggaatcaccattatggagcgtagctccttcgagaagaacccgattgactttctggaagccaaaggatataaagaggtcaagaaagatcttatcattaagctgcctaagtattcactcttcgagctggaaaatggtcgtaaacgcatgctcgcttctgccggcgagttgcagaagggcaatgaattagcacttccatcaaagtacgttaacttcctgtatttggccagccattacgagaaactgaaggggtctccagaggacaacgaacagaaacaattatttgtagagcagcacaagcattatcttgatgaaatcattgagcaaatttccgaattcagtaaacgcgtaatcctggccgatgcaaacctcgacaaggtgctgagcgcttacaataagcatcgcgacaaacctatccgtgagcaggctgaaaatatcattcacctgttcacattaacgaacctgggcgctccggccgcttttaaatatttcgacacgacaatcgaccgtaagcgctataccagtacgaaagaagtgttggatgcgacccttattcaccagtcaattacaggattatatgagacccgtatcgaccttagccaattaggtggggatgcgccagcgcctgctcctgcacccgctccagctcctgccccagcgatggttagcaaaggtgaagaactgtttaccggcgttgtgccgattctggtggaactggatggtgatgtgaatggccataaatttagcgttagcggcgaaggcgaaggtgatgcgacctatggtaaactgaccctgaaatttatttgcaccaccggtaaactgccggttccgtggccgaccctggtgaccaccctgacctatggcgttcagtgctttagccgctatccggatcatatgaaacagcatgatttctttaaaagcgcgatgccggaaggctatgtgcaggaacgtaccatttttttcaaagatgatggcaactataaaacccgtgcggaagttaaatttgaaggcgataccctggtgaaccgcattgaactgaaaggtattgattttaaagaagatggcaacattctgggtcataaactggaatataattacaacagccataatgtgtatattatggccgataaacagaaaaatggcatcaaagtgaactttaaaatccgtcacaacattgaagatggtagcgtgcagctggcggatcattatcagcagaataccccgattggtgatggcccggtgctgctgccggataatcattatctgagcacccagagcgcgctgagcaaagatccgaatgaaaaacgtgatcatatggtgctgctggaatttgttaccgccgcgggcattaccctgggtatggatgaactgtataaa

SEQ ID NO: 361 - DNA, 4872 bp, synthetic construct
  misc_feature 1..4872: note = SYNTHETIC
  source 1..4872: mol_type = other DNA
atggacaaaaagtactctattggcctggatatcgggaccaacagcgtcgggtgggctgttatcaccgacgagtataaagtaccttcgaaaaagttcaaagtgctgggcaacaccgatcgccattcaatcaaaaagaacttgattggtgcgctgttgtttgactccggggaaaccgccgaggcgactcgccttaaacgtacagcacgtcgccggtacactcggcgtaagaatcgcatttgctatttgcaggaaatctttagcaacgagatggcaaaagtcgatgactcgtttttccaccgcctcgaggaaagctttctggtggaggaagacaaaaagcatgagcgtcacccgatcttcggcaacattgtcgatgaagtagcgtatcatgaaaaatacccaaccatttaccacttacgcaaaaagctggtggacagcactgacaaagctgatttgcgccttatctatttagccctggcacatatgattaagtttcgtggtcacttcctgatcgaaggagacttaaatcccgacaacagtgatgttgataaattgtttattcagcttgtccaaacttacaatcaactgttcgaggaaaacccgatcaatgcctccggtgtggatgcaaaagccattttaagtgcacgccttagcaagtcccgtcgcttagaaaaccttatcgcgcagctgcccggcgagaaaaagaatggtttgtttgggaaccttattgccttgagcttaggcctcaccccgaatttcaaaagtaatttcgatcttgcagaagacgccaaattacaactgtcgaaggatacttatgatgacgatctcgataatctgttagcgcagattggtgaccaatacgccgatctttttctggcggctaaaaatctgagcgacgccatcttgctttcggatattctccgcgttaacaccgaaatcacgaaagcgcctcttagtgccagcatgattaaacgttatgatgaacaccaccaggacctgaccttactcaaagcgttggttcgccagcaactgccagagaagtacaaagaaatcttctttgatcagtcaaagaatggttatgccggctatattgacgggggtgcaagccaagaggaattctacaaatttatcaagcctattctggagaaaatggatggcaccgaagagttattggtgaagcttaaccgtgaagacctcctgcggaaacagcgcacattcgataatggttcgatcccacaccaaatccatttgggggagttacacgctattttgcgtcgccaggaagacttttaccctttcctgaaggataaccgggagaaaattgagaagatccttacctttcgtattccgtattacgtaggccccttagcacggggtaatagccgtttcgcgtggatgacacggaagtcggaagagacgatcaccccgtggaacttcgaagaggtagtcgacaagggcgcatcagcgcagtcttttattgaacgtatgacgaatttcgataaaaacttgcccaatgagaaggtgcttccgaaacattccttgttatatgaatattttacagtttacaacgagctgaccaaggttaaatacgtgacggaaggaatgcgcaagcccgcttttcttagcggtgagcaaaaaaaggcgatcgtcgacctgttattcaaaacgaatcgtaaggtgactgtaaagcaactcaaagaagattacttcaaaaagattgagtgcttcgacagcgtcgaaatctctggggtagaggatcggtttaacgcaagtttaggtacctaccatgacctgcttaaaatcattaaggataaagacttcttagataatgaagagaacgaagatattctcgaggacatcgtcttgacgttaaccttatttgaggatcgtgaaatgattgaggaacgcctcaaaacttatgcccacctgttcgacgataaggtgatgaagcagctgaaacgtcggcgctacacaggatggggccgcttgagtcgcaaacttattaacggaatccgtgacaagcaatccggcaaaacgattctggatttcttgaagtcggacggatttgctaatcgcaacttcatgcagttgatccatgatgactccctgacttttaaagaggatattcaaaaggcgcaggttagtggtcaaggcgacagcttacacgaacacatcgcaaatttggctggttcgccggccattaaaaaggggatcctccagaccgtgaaagttgtagatgagcttgttaaggtcatgggtcgtcataagcccgaaaacatcgtgattgaaatggcgcgggagaatcaaacgacccagaaaggacaaaagaatagccgtgaacggatgaagcggatcgaggaaggcattaaagagctggggtctcaaatcttgaaggaacaccctgtggagaacactcagctccaaaatgaaaaactttacctgtactatttgcagaacggacgcgatatgtacgtggaccaagagttggatattaatcggctgagtgactacgacgttgatcatatcgtcccgcagagcttcctcaaagacgattctattgacaataaggtactgacgcgctctgataaaaaccgtggtaagtcggacaacgtgccctccgaagaggttgtgaaaaagatgaaaaattattggcgccagcttttaaacgcgaagctgatcacacaacgtaaattcgataatttgaccaaggctgaacggggtggcctgagcgagttagataaggcaggatttattaaacgccagttagtggagactcgtcaaatcaccaaacatgtcgcgcagattttggacagccggatgaacaccaagtacgatgaaaatgacaaactgatccgtgaggtgaaagtcattactctgaagtccaaattagttagtgatttccggaaggactttcaattctacaaagtccgtgaaattaataactatcatcacgcacatgacgcgtacctgaatgcagtggttgggaccgcccttatcaagaaatatcctaagctggagtcggagtttgtctatggcgactataaggtatacgatgttcgcaaaatgattgcgaaatctgagcaggagatcggtaaggcaaccgcaaaatatttcttttactcaaacattatgaatttctttaagacagaaatcactctggccaacggggagattcgcaaacgtccgttgatcgaaacaaacggcgagactggcgaaattgtttgggacaaagggcgtgatttcgcgacggtgcgcaaggtactgagcatgcctcaagtcaatattgttaagaaaaccgaagtgcagacgggcgggttttccaaggaaagcatcttacccaaacgtaattcagataaacttattgcacgcaaaaaggactgggatccgaaaaagtatggaggcttcgacagtccaaccgtagcctactctgttctcgttgtagcgaaagtagaaaagggtaaatccaagaaactgaaatctgtcaaggagttgcttggaatcaccattatggagcgtagctccttcgagaagaacccgattgactttctggaagccaaaggatataaagaggtcaagaaagatcttatcattaagctgcctaagtattcactcttcgagctggaaaatggtcgtaaacgcatgctcgcttctgccggcgagttgcagaagggcaatgaattagcacttccatcaaagtacgttaacttcctgtatttggccagccattacgagaaactgaaggggtctccagaggacaacgaacagaaacaattatttgtagagcagcacaagcattatcttgatgaaatcattgagcaaatttccgaattcagtaaacgcgtaatcctggccgatgcaaacctcgacaaggtgctgagcgcttacaataagcatcgcgacaaacctatccgtgagcaggctgaaaatatcattcacctgttcacattaacgaacctgggcgctccggccgcttttaaatatttcgacacgacaatcgaccgtaagcgctataccagtacgaaagaagtgttggatgcgacccttattcaccagtcaattacaggattatatgagacccgtatcgaccttagccaattaggtggggatgcgccagcgcctgctcctgcacccgctccagcgccagctcctgcacctgcgatggttagcaaaggtgaagaactgtttaccggcgttgtgccgattctggtggaactggatggtgatgtgaatggccataaatttagcgttagcggcgaaggcgaaggtgatgcgacctatggtaaactgaccctgaaatttatttgcaccaccggtaaactgccggttccgtggccgaccctggtgaccaccctgacctatggcgttcagtgctttagccgctatccggatcatatgaaacagcatgatttctttaaaagcgcgatgccggaaggctatgtgcaggaacgtaccatttttttcaaagatgatggcaactataaaacccgtgcggaagttaaatttgaaggcgataccctggtgaaccgcattgaactgaaaggtattgattttaaagaagatggcaacattctgggtcataaactggaatataattacaacagccataatgtgtatattatggccgataaacagaaaaatggcatcaaagtgaactttaaaatccgtcacaacattgaagatggtagcgtgcagctggcggatcattatcagcagaataccccgattggtgatggcccggtgctgctgccggataatcattatctgagcacccagagcgcgctgagcaaagatccgaatgaaaaacgtgatcatatggtgctgctggaatttgttaccgccgcgggcattaccctgggtatggatgaactgtataaa

SEQ ID NO: 362 - DNA, 4878 bp, synthetic construct
  misc_feature 1..4878: note = SYNTHETIC
  source 1..4878: mol_type = other DNA
atggacaaaaagtactctattggcctggatatcgggaccaacagcgtcgggtgggctgttatcaccgacgagtataaagtaccttcgaaaaagttcaaagtgctgggcaacaccgatcgccattcaatcaaaaagaacttgattggtgcgctgttgtttgactccggggaaaccgccgaggcgactcgccttaaacgtacagcacgtcgccggtacactcggcgtaagaatcgcatttgctatttgcaggaaatctttagcaacgagatggcaaaagtcgatgactcgtttttccaccgcctcgaggaaagctttctggtggaggaagacaaaaagcatgagcgtcacccgatcttcggcaacattgtcgatgaagtagcgtatcatgaaaaatacccaaccatttaccacttacgcaaaaagctggtggacagcactgacaaagctgatttgcgccttatctatttagccctggcacatatgattaagtttcgtggtcacttcctgatcgaaggagacttaaatcccgacaacagtgatgttgataaattgtttattcagcttgtccaaacttacaatcaactgttcgaggaaaacccgatcaatgcctccggtgtggatgcaaaagccattttaagtgcacgccttagcaagtcccgtcgcttagaaaaccttatcgcgcagctgcccggcgagaaaaagaatggtttgtttgggaaccttattgccttgagcttaggcctcaccccgaatttcaaaagtaatttcgatcttgcagaagacgccaaattacaactgtcgaaggatacttatgatgacgatctcgataatctgttagcgcagattggtgaccaatacgccgatctttttctggcggctaaaaatctgagcgacgccatcttgctttcggatattctccgcgttaacaccgaaatcacgaaagcgcctcttagtgccagcatgattaaacgttatgatgaacaccaccaggacctgaccttactcaaagcgttggttcgccagcaactgccagagaagtacaaagaaatcttctttgatcagtcaaagaatggttatgccggctatattgacgggggtgcaagccaagaggaattctacaaatttatcaagcctattctggagaaaatggatggcaccgaagagttattggtgaagcttaaccgtgaagacctcctgcggaaacagcgcacattcgataatggttcgatcccacaccaaatccatttgggggagttacacgctattttgcgtcgccaggaagacttttaccctttcctgaaggataaccgggagaaaattgagaagatccttacctttcgtattccgtattacgtaggccccttagcacggggtaatagccgtttcgcgtggatgacacggaagtcggaagagacgatcaccccgtggaacttcgaagaggtagtcgacaagggcgcatcagcgcagtcttttattgaacgtatgacgaatttcgataaaaacttgcccaatgagaaggtgcttccgaaacattccttgttatatgaatattttacagtttacaacgagctgaccaaggttaaatacgtgacggaaggaatgcgcaagcccgcttttcttagcggtgagcaaaaaaaggcgatcgtcgacctgttattcaaaacgaatcgtaaggtgactgtaaagcaactcaaagaagattacttcaaaaagattgagtgcttcgacagcgtcgaaatctctggggtagaggatcggtttaacgcaagtttaggtacctaccatgacctgcttaaaatcattaaggataaagacttcttagataatgaagagaacgaagatattctcgaggacatcgtcttgacgttaaccttatttgaggatcgtgaaatgattgaggaacgcctcaaaacttatgcccacctgttcgacgataaggtgatgaagcagctgaaacgtcggcgctacacaggatggggccgcttgagtcgcaaacttattaacggaatccgtgacaagcaatccggcaaaacgattctggatttcttgaagtcggacggatttgctaatcgcaacttcatgcagttgatccatgatgactccctgacttttaaagaggatattcaaaaggcgcaggttagtggtcaaggcgacagcttacacgaacacatcgcaaatttggctggttcgccggccattaaaaaggggatcctccagaccgtgaaagttgtagatgagcttgttaaggtcatgggtcgtcataagcccgaaaacatcgtgattgaaatggcgcgggagaatcaaacgacccagaaaggacaaaagaatagccgtgaacggatgaagcggatcgaggaaggcattaaagagctggggtctcaaatcttgaaggaacaccctgtggagaacactcagctccaaaatgaaaaactttacctgtactatttgcagaacggacgcgatatgtacgtggaccaagagttggatattaatcggctgagtgactacgacgttgatcatatcgtcccgcagagcttcctcaaagacgattctattgacaataaggtactgacgcgctctgataaaaaccgtggtaagtcggacaacgtgccctccgaagaggttgtgaaaaagatgaaaaattattggcgccagcttttaaacgcgaagctgatcacacaacgtaaattcgataatttgaccaaggctgaacggggtggcctgagcgagttagataaggcaggatttattaaacgccagttagtggagactcgtcaaatcaccaaacatgtcgcgcagattttggacagccggatgaacaccaagtacgatgaaaatgacaaactgatccgtgaggtgaaagtcattactctgaagtccaaattagttagtgatttccggaaggactttcaattctacaaagtccgtgaaattaataactatcatcacgcacatgacgcgtacctgaatgcagtggttgggaccgcccttatcaagaaatatcctaagctggagtcggagtttgtctatggcgactataaggtatacgatgttcgcaaaatgattgcgaaatctgagcaggagatcggtaaggcaaccgcaaaatatttcttttactcaaacattatgaatttctttaagacagaaatcactctggccaacggggagattcgcaaacgtccgttgatcgaaacaaacggcgagactggcgaaattgtttgggacaaagggcgtgatttcgcgacggtgcgcaaggtactgagcatgcctcaagtcaatattgttaagaaaaccgaagtgcagacgggcgggttttccaaggaaagcatcttacccaaacgtaattcagataaacttattgcacgcaaaaaggactgggatccgaaaaagtatggaggcttcgacagtccaaccgtagcctactctgttctcgttgtagcgaaagtagaaaagggtaaatccaagaaactgaaatctgtcaaggagttgcttggaatcaccattatggagcgtagctccttcgagaagaacccgattgactttctggaagccaaaggatataaagaggtcaagaaagatcttatcattaagctgcctaagtattcactcttcgagctggaaaatggtcgtaaacgcatgctcgcttctgccggcgagttgcagaagggcaatgaattagcacttccatcaaagtacgttaacttcctgtatttggccagccattacgagaaactgaaggggtctccagaggacaacgaacagaaacaattatttgtagagcagcacaagcattatcttgatgaaatcattgagcaaatttccgaattcagtaaacgcgtaatcctggccgatgcaaacctcgacaaggtgctgagcgcttacaataagcatcgcgacaaacctatccgtgagcaggctgaaaatatcattcacctgttcacattaacgaacctgggcgctccggccgcttttaaatatttcgacacgacaatcgaccgtaagcgctataccagtacgaaagaagtgttggatgcgacccttattcaccagtcaattacaggattatatgagacccgtatcgaccttagccaattaggtggggatgcgccagcgcctgctcctgcacccgctccagctcctgcgccagctcctgcacctgcgatggttagcaaaggtgaagaactgtttaccggcgttgtgccgattctggtggaactggatggtgatgtgaatggccataaatttagcgttagcggcgaaggcgaaggtgatgcgacctatggtaaactgaccctgaaatttatttgcaccaccggtaaactgccggttccgtggccgaccctggtgaccaccctgacctatggcgttcagtgctttagccgctatccggatcatatgaaacagcatgatttctttaaaagcgcgatgccggaaggctatgtgcaggaacgtaccatttttttcaaagatgatggcaactataaaacccgtgcggaagttaaatttgaaggcgataccctggtgaaccgcattgaactgaaaggtattgattttaaagaagatggcaacattctgggtcataaactggaatataattacaacagccataatgtgtatattatggccgataaacagaaaaatggcatcaaagtgaactttaaaatccgtcacaacattgaagatggtagcgtgcagctggcggatcattatcagcagaataccccgattggtgatggcccggtgctgctgccggataatcattatctgagcacccagagcgcgctgagcaaagatccgaatgaaaaacgtgatcatatggtgctgctggaatttgttaccgccgcgggcattaccctgggtatggatgaactgtataaa

SEQ ID NO: 363 - DNA, 4884 bp, synthetic construct
  misc_feature 1..4884: note = SYNTHETIC
  source 1..4884: mol_type = other DNA
atggacaaaaagtactctattggcctggatatcgggaccaacagcgtcgggtgggctgttatcaccgacgagtataaagtaccttcgaaaaagttcaaagtgctgggcaacaccgatcgccattcaatcaaaaagaacttgattggtgcgctgttgtttgactccggggaaaccgccgaggcgactcgccttaaacgtacagcacgtcgccggtacactcggcgtaagaatcgcatttgctatttgcaggaaatctttagcaacgagatggcaaaagtcgatgactcgtttttccaccgcctcgaggaaagctttctggtggaggaagacaaaaagcatgagcgtcacccgatcttcggcaacattgtcgatgaagtagcgtatcatgaaaaatacccaaccatttaccacttacgcaaaaagctggtggacagcactgacaaagctgatttgcgccttatctatttagccctggcacatatgattaagtttcgtggtcacttcctgatcgaaggagacttaaatcccgacaacagtgatgttgataaattgtttattcagcttgtccaaacttacaatcaactgttcgaggaaaacccgatcaatgcctccggtgtggatgcaaaagccattttaagtgcacgccttagcaagtcccgtcgcttagaaaaccttatcgcgcagctgcccggcgagaaaaagaatggtttgtttgggaaccttattgccttgagcttaggcctcaccccgaatttcaaaagtaatttcgatcttgcagaagacgccaaattacaactgtcgaaggatacttatgatgacgatctcgataatctgttagcgcagattggtgaccaatacgccgatctttttctggcggctaaaaatctgagcgacgccatcttgctttcggatattctccgcgttaacaccgaaatcacgaaagcgcctcttagtgccagcatgattaaacgttatgatgaacaccaccaggacctgaccttactcaaagcgttggttcgccagcaactgccagagaagtacaaagaaatcttctttgatcagtcaaagaatggttatgccggctatattgacgggggtgcaagccaagaggaattctacaaatttatcaagcctattctggagaaaatggatggcaccgaagagttattggtgaagcttaaccgtgaagacctcctgcggaaacagcgcacattcgataatggttcgatcccacaccaaatccatttgggggagttacacgctattttgcgtcgccaggaagacttttaccctttcctgaaggataaccgggagaaaattgagaagatccttacctttcgtattccgtattacgtaggccccttagcacggggtaatagccgtttcgcgtggatgacacggaagtcggaagagacgatcaccccgtggaacttcgaagaggtagtcgacaagggcgcatcagcgcagtcttttattgaacgtatgacgaatttcgataaaaacttgcccaatgagaaggtgcttccgaaacattccttgttatatgaatattttacagtttacaacgagctgaccaaggttaaatacgtgacggaaggaatgcgcaagcccgcttttcttagcggtgagcaaaaaaaggcgatcgtcgacctgttattcaaaacgaatcgtaaggtgactgtaaagcaactcaaagaagattacttcaaaaagattgagtgcttcgacagcgtcgaaatctctggggtagaggatcggtttaacgcaagtttaggtacctaccatgacctgcttaaaatcattaaggataaagacttcttagataatgaagagaacgaagatattctcgaggacatcgtcttgacgttaaccttatttgaggatcgtgaaatgattgaggaacgcctcaaaacttatgcccacctgttcgacgataaggtgatgaagcagctgaaacgtcggcgctacacaggatggggccgcttgagtcgcaaacttattaacggaatccgtgacaagcaatccggcaaaacgattctggatttcttgaagtcggacggatttgctaatcgcaacttcatgcagttgatccatgatgactccctgacttttaaagaggatattcaaaaggcgcaggttagtggtcaaggcgacagcttacacgaacacatcgcaaatttggctggttcgccggccattaaaaaggggatcctccagaccgtgaaagttgtagatgagcttgttaaggtcatgggtcgtcataagcccgaaaacatcgtgattgaaatggcgcgggagaatcaaacgacccagaaaggacaaaagaatagccgtgaacggatgaagcggatcgaggaaggcattaaagagctggggtctcaaatcttgaaggaacaccctgtggagaacactcagctccaaaatgaaaaactttacctgtactatttgcagaacggacgcgatatgtacgtggaccaagagttggatattaatcggctgagtgactacgacgttgatcatatcgtcccgcagagcttcctcaaagacgattctattgacaataaggtactgacgcgctctgataaaaaccgtggtaagtcggacaacgtgccctccgaagaggttgtgaaaaagatgaaaaattattggcgccagcttttaaacgcgaagctgatcacacaacgtaaattcgataatttgaccaaggctgaacggggtggcctgagcgagttagataaggcaggatttattaaacgccagttagtggagactcgtcaaatcaccaaacatgtcgcgcagattttggacagccggatgaacaccaagtacgatgaaaatgacaaactgatccgtgaggtgaaagtcattactctgaagtccaaattagttagtgatttccggaaggactttcaattctacaaagtccgtgaaattaataactatcatcacgcacatgacgcgtacctgaatgcagtggttgggaccgcccttatcaagaaatatcctaagctggagtcggagtttgtctatggcgactataaggtatacgatgttcgcaaaatgattgcgaaatctgagcaggagatcggtaaggcaaccgcaaaatatttcttttactcaaacattatgaatttctttaagacagaaatcactctggccaacggggagattcgcaaacgtccgttgatcgaaacaaacggcgagactggcgaaattgtttgggacaaagggcgtgatttcgcgacggtgcgcaaggtactgagcatgcctcaagtcaatattgttaagaaaaccgaagtgcagacgggcgggttttccaaggaaagcatcttacccaaacgtaattcagataaacttattgcacgcaaaaaggactgggatccgaaaaagtatggaggcttcgacagtccaaccgtagcctactctgttctcgttgtagcgaaagtagaaaagggtaaatccaagaaactgaaatctgtcaaggagttgcttggaatcaccattatggagcgtagctccttcgagaagaacccgattgactttctggaagccaaaggatataaagaggtcaagaaagatcttatcattaagctgcctaagtattcactcttcgagctggaaaatggtcgtaaacgcatgctcgcttctgccggcgagttgcagaagggcaatgaattagcacttccatcaaagtacgttaacttcctgtatttggccagccattacgagaaactgaaggggtctccagaggacaacgaacagaaacaattatttgtagagcagcacaagcattatcttgatgaaatcattgagcaaatttccgaattcagtaaacgcgtaatcctggccgatgcaaacctcgacaaggtgctgagcgcttacaataagcatcgcgacaaacctatccgtgagcaggctgaaaatatcattcacctgttcacattaacgaacctgggcgctccggccgcttttaaatatttcgacacgacaatcgaccgtaagcgctataccagtacgaaagaagtgttggatgcgacccttattcaccagtcaattacaggattatatgagacccgtatcgaccttagccaattaggtggggatgcgccagcgcctgctcctgcacccgctccagctcctgctcctgcgccagctcctgcacctgcgatggttagcaaaggtgaagaactgtttaccggcgttgtgccgattctggtggaactggatggtgatgtgaatggccataaatttagcgttagcggcgaaggcgaaggtgatgcgacctatggtaaactgaccctgaaatttatttgcaccaccggtaaactgccggttccgtggccgaccctggtgaccaccctgacctatggcgttcagtgctttagccgctatccggatcatatgaaacagcatgatttctttaaaagcgcgatgccggaaggctatgtgcaggaacgtaccatttttttcaaagatgatggcaactataaaacccgtgcggaagttaaatttgaaggcgataccctggtgaaccgcattgaactgaaaggtattgattttaaagaagatggcaacattctgggtcataaactggaatataattacaacagccataatgtgtatattatggccgataaacagaaaaatggcatcaaagtgaactttaaaatccgtcacaacattgaagatggtagcgtgcagctggcggatcattatcagcagaataccccgattggtgatggcccggtgctgctgccggataatcattatctgagcacccagagcgcgctgagcaaagatccgaatgaaaaacgtgatcatatggtgctgctggaatttgttaccgccgcgggcattaccctgggtatggatgaactgtataaa

SEQ ID NO: 364 - DNA, 4890 bp, synthetic construct
  misc_feature 1..4890: note = SYNTHETIC
  source 1..4890: mol_type = other DNA
atggacaaaaagtactctattggcctggatatcgggaccaacagcgtcgggtgggctgttatcaccgacgagtataaagtaccttcgaaaaagttcaaagtgctgggcaacaccgatcgccattcaatcaaaaagaacttgattggtgcgctgttgtttgactccggggaaaccgccgaggcgactcgccttaaacgtacagcacgtcgccggtacactcggcgtaagaatcgcatttgctatttgcaggaaatctttagcaacgagatggcaaaagtcgatgactcgtttttccaccgcctcgaggaaagctttctggtggaggaagacaaaaagcatgagcgtcacccgatcttcggcaacattgtcgatgaagtagcgtatcatgaaaaatacccaaccatttaccacttacgcaaaaagctggtggacagcactgacaaagctgatttgcgccttatctatttagccctggcacatatgattaagtttcgtggtcacttcctgatcgaaggagacttaaatcccgacaacagtgatgttgataaattgtttattcagcttgtccaaacttacaatcaactgttcgaggaaaacccgatcaatgcctccggtgtggatgcaaaagccattttaagtgcacgccttagcaagtcccgtcgcttagaaaaccttatcgcgcagctgcccggcgagaaaaagaatggtttgtttgggaaccttattgccttgagcttaggcctcaccccgaatttcaaaagtaatttcgatcttgcagaagacgccaaattacaactgtcgaaggatacttatgatgacgatctcgataatctgttagcgcagattggtgaccaatacgccgatctttttctggcggctaaaaatctgagcgacgccatcttgctttcggatattctccgcgttaacaccgaaatcacgaaagcgcctcttagtgccagcatgattaaacgttatgatgaacaccaccaggacctgaccttactcaaagcgttggttcgccagcaactgccagagaagtacaaagaaatcttctttgatcagtcaaagaatggttatgccggctatattgacgggggtgcaagccaagaggaattctacaaatttatcaagcctattctggagaaaatggatggcaccgaagagttattggtgaagcttaaccgtgaagacctcctgcggaaacagcgcacattcgataatggttcgatcccacaccaaatccatttgggggagttacacgctattttgcgtcgccaggaagacttttaccctttcctgaaggataaccgggagaaaattgagaagatccttacctttcgtattccgtattacgtaggccccttagcacggggtaatagccgtttcgcgtggatgacacggaagtcggaagagacgatcaccccgtggaacttcgaagaggtagtcgacaagggcgcatcagcgcagtcttttattgaacgtatgacgaatttcgataaaaacttgcccaatgagaaggtgcttccgaaacattccttgttatatgaatattttacagtttacaacgagctgaccaaggttaaatacgtgacggaaggaatgcgcaagcccgcttttcttagcggtgagcaaaaaaaggcgatcgtcgacctgttattcaaaacgaatcgtaaggtgactgtaaagcaactcaaagaagattacttcaaaaagattgagtgcttcgacagcgtcgaaatctctggggtagaggatcggtttaacgcaagtttaggtacctaccatgacctgcttaaaatcattaaggataaagacttcttagataatgaagagaacgaagatattctcgaggacatcgtcttgacgttaaccttatttgaggatcgtgaaatgattgaggaacgcctcaaaacttatgcccacctgttcgacgataaggtgatgaagcagctgaaacgtcggcgctacacaggatggggccgcttgagtcgcaaacttattaacggaatccgtgacaagcaatccggcaaaacgattctggatttcttgaagtcggacggatttgctaatcgcaacttcatgcagttgatccatgatgactccctgacttttaaagaggatattcaaaaggcgcaggttagtggtcaaggcgacagcttacacgaacacatcgcaaatttggctggttcgccggccattaaaaaggggatcctccagaccgtgaaagttgtagatgagcttgttaaggtcatgggtcgtcataagcccgaaaacatcgtgattgaaatggcgcgggagaatcaaacgacccagaaaggacaaaagaatagccgtgaacggatgaagcggatcgaggaaggcattaaagagctggggtctcaaatcttgaaggaacaccctgtggagaacactcagctccaaaatgaaaaactttacctgtactatttgcagaacggacgcgatatgtacgtggaccaagagttggatattaatcggctgagtgactacgacgttgatcatatcgtcccgcagagcttcctcaaagacgattctattgacaataaggtactgacgcgctctgataaaaaccgtggtaagtcggacaacgtgccctccgaagaggttgtgaaaaagatgaaaaattattggcgccagcttttaaacgcgaagctgatcacacaacgtaaattcgataatttgaccaaggctgaacggggtggcctgagcgagttagataaggcaggatttattaaacgccagttagtggagactcgtcaaatcaccaaacatgtcgcgcagattttggacagccggatgaacaccaagtacgatgaaaatgacaaactgatccgtgaggtgaaagtcattactctgaagtccaaattagttagtgatttccggaaggactttcaattctacaaagtccgtgaaattaataactatcatcacgcacatgacgcgtacctgaatgcagtggttgggaccgcccttatcaagaaatatcctaagctggagtcggagtttgtctatggcgactataaggtatacgatgttcgcaaaatgattgcgaaatctgagcaggagatcggtaaggcaaccgcaaaatatttcttttactcaaacattatgaatttctttaagacagaaatcactctggccaacggggagattcgcaaacgtccgttgatcgaaacaaacggcgagactggcgaaattgtttgggacaaagggcgtgatttcgcgacggtgcgcaaggtactgagcatgcctcaagtcaatattgttaagaaaaccgaagtgcagacgggcgggttttccaaggaaagcatcttacccaaacgtaattcagataaacttattgcacgcaaaaaggactgggatccgaaaaagtatggaggcttcgacagtccaaccgtagcctactctgttctcgttgtagcgaaagtagaaaagggtaaatccaagaaactgaaatctgtcaaggagttgcttggaatcaccattatggagcgtagctccttcgagaagaacccgattgactttctggaagccaaaggatataaagaggtcaagaaagatcttatcattaagctgcctaagtattcactcttcgagctggaaaatggtcgtaaacgcatgctcgcttctgccggcgagttgcagaagggcaatgaattagcacttccatcaaagtacgttaacttcctgtatttggccagccattacgagaaactgaaggggtctccagaggacaacgaacagaaacaattatttgtagagcagcacaagcattatcttgatgaaatcattgagcaaatttccgaattcagtaaacgcgtaatcctggccgatgcaaacctcgacaaggtgctgagcgcttacaataagcatcgcgacaaacctatccgtgagcaggctgaaaatatcattcacctgttcacattaacgaacctgggcgctccggccgcttttaaatatttcgacacgacaatcgaccgtaagcgctataccagtacgaaagaagtgttggatgcgacccttattcaccagtcaattacaggattatatgagacccgtatcgaccttagccaattaggtggggatgcgccagcgcctgctcctgcacccgctccagctcctgccccagctccagcgcccgctcctgcacctgcgatggttagcaaaggtgaagaactgtttaccggcgttgtgccgattctggtggaactggatggtgatgtgaatggccataaatttagcgttagcggcgaaggcgaaggtgatgcgacctatggtaaactgaccctgaaatttatttgcaccaccggtaaactgccggttccgtggccgaccctggtgaccaccctgacctatggcgttcagtgctttagccgctatccggatcatatgaaacagcatgatttctttaaaagcgcgatgccggaaggctatgtgcaggaacgtaccatttttttcaaagatgatggcaactataaaacccgtgcggaagttaaatttgaaggcgataccctggtgaaccgcattgaactgaaaggtattgattttaaagaagatggcaacattctgggtcataaactggaatataattacaacagccataatgtgtatattatggccgataaacagaaaaatggcatcaaagtgaactttaaaatccgtcacaacattgaagatggtagcgtgcagctggcggatcattatcagcagaataccccgattggtgatggcccggtgctgctgccggataatcattatctgagcacccagagcgcgctgagcaaagatccgaatgaaaaacgtgatcatatggtgctgctggaatttgttaccgccgcgggcattaccctgggtatggatgaactgtataaa

SEQ ID NO: 365 - DNA, 4896 bp, synthetic construct
  misc_feature 1..4896: note = SYNTHETIC
  source 1..4896: mol_type = other DNA
atggacaaaaagtactctattggcctggatatcgggaccaacagcgtcgggtgggctgttatcaccgacgagtataaagtaccttcgaaaaagttcaaagtgctgggcaacaccgatcgccattcaatcaaaaagaacttgattggtgcgctgttgtttgactccggggaaaccgccgaggcgactcgccttaaacgtacagcacgtcgccggtacactcggcgtaagaatcgcatttgctatttgcaggaaatctttagcaacgagatggcaaaagtcgatgactcgtttttccaccgcctcgaggaaagctttctggtggaggaagacaaaaagcatgagcgtcacccgatcttcggcaacattgtcgatgaagtagcgtatcatgaaaaatacccaaccatttaccacttacgcaaaaagctggtggacagcactgacaaagctgatttgcgccttatctatttagccctggcacatatgattaagtttcgtggtcacttcctgatcgaaggagacttaaatcccgacaacagtgatgttgataaattgtttattcagcttgtccaaacttacaatcaactgttcgaggaaaacccgatcaatgcctccggtgtggatgcaaaagccattttaagtgcacgccttagcaagtcccgtcgcttagaaaaccttatcgcgcagctgcccggcgagaaaaagaatggtttgtttgggaaccttattgccttgagcttaggcctcaccccgaatttcaaaagtaatttcgatcttgcagaagacgccaaattacaactgtcgaaggatacttatgatgacgatctcgataatctgttagcgcagattggtgaccaatacgccgatctttttctggcggctaaaaatctgagcgacgccatcttgctttcggatattctccgcgttaacaccgaaatcacgaaagcgcctcttagtgccagcatgattaaacgttatgatgaacaccaccaggacctgaccttactcaaagcgttggttcgccagcaactgccagagaagtacaaagaaatcttctttgatcagtcaaagaatggttatgccggctatattgacgggggtgcaagccaagaggaattctacaaatttatcaagcctattctggagaaaatggatggcaccgaagagttattggtgaagcttaaccgtgaagacctcctgcggaaacagcgcacattcgataatggttcgatcccacaccaaatccatttgggggagttacacgctattttgcgtcgccaggaagacttttaccctttcctgaaggataaccgggagaaaattgagaagatccttacctttcgtattccgtattacgtaggccccttagcacggggtaatagccgtttcgcgtggatgacacggaagtcggaagagacgatcaccccgtggaacttcgaagaggtagtcgacaagggcgcatcagcgcagtcttttattgaacgtatgacgaatttcgataaaaacttgcccaatgagaaggtgcttccgaaacattccttgttatatgaatattttacagtttacaacgagctgaccaaggttaaatacgtgacggaaggaatgcgcaagcccgcttttcttagcggtgagcaaaaaaaggcgatcgtcgacctgttattcaaaacgaatcgtaaggtgactgtaaagcaactcaaagaagattacttcaaaaagattgagtgcttcgacagcgtcgaaatctctggggtagaggatcggtttaacgcaagtttaggtacctaccatgacctgcttaaaatcattaaggataaagacttcttagataatgaagagaacgaagatattctcgaggacatcgtcttgacgttaaccttatttgaggatcgtgaaatgattgaggaacgcctcaaaacttatgcccacctgttcgacgataaggtgatgaagcagctgaaacgtcggcgctacacaggatggggccgcttgagtcgcaaacttattaacggaatccgtgacaagcaatccggcaaaacgattctggatttcttgaagtcggacggatttgctaatcgcaacttcatgcagttgatccatgatgactccctgacttttaaagaggatattcaaaaggcgcaggttagtggtcaaggcgacagcttacacgaacacatcgcaaatttggctggttcgccggccattaaaaaggggatcctccagaccgtgaaagttgtagatgagcttgttaaggtcatgggtcgtcataagcccgaaaacatcgtgattgaaatggcgcgggagaatcaaacgacccagaaaggacaaaagaatagccgtgaacggatgaagcggatcgaggaaggcattaaagagctggggtctcaaatcttgaaggaacaccctgtggagaacactcagctccaaaatgaaaaactttacctgtactatttgcagaacggacgcgatatgtacgtggaccaagagttggatattaatcggctgagtgactacgacgttgatcatatcgtcccgcagagcttcctcaaagacgattctattgacaataaggtactgacgcgctctgataaaaaccgtggtaagtcggacaacgtgccctccgaagaggttgtgaaaaagatgaaaaattattggcgccagcttttaaacgcgaagctgatcacacaacgtaaattcgataatttgaccaaggctgaacggggtggcctgagcgagttagataaggcaggatttattaaacgccagttagtggagactcgtcaaatcaccaaacatgtcgcgcagattttggacagccggatgaacaccaagtacgatgaaaatgacaaactgatccgtgaggtgaaagtcattactctgaagtccaaattagttagtgatttccggaaggactttcaattctacaaagtccgtgaaattaataactatcatcacgcacatgacgcgtacctgaatgcagtggttgggaccgcccttatcaagaaatatcctaagctggagtcggagtttgtctatggcgactataaggtatacgatgttcgcaaaatgattgcgaaatctgagcaggagatcggtaaggcaaccgcaaaatatttcttttactcaaacattatgaatttctttaagacagaaatcactctggccaacggggagattcgcaaacgtccgttgatcgaaacaaacggcgagactggcgaaattgtttgggacaaagggcgtgatttcgcgacggtgcgcaaggtactgagcatgcctcaagtcaatattgttaagaaaaccgaagtgcagacgggcgggttttccaaggaaagcatcttacccaaacgtaattcagataaacttattgcacgcaaaaaggactgggatccgaaaaagtatggaggcttcgacagtccaaccgtagcctactctgttctcgttgtagcgaaagtagaaaagggtaaatccaagaaactgaaatctgtcaaggagttgcttggaatcaccattatggagcgtagctccttcgagaagaacccgattgactttctggaagccaaaggatataaagaggtcaagaaagatcttatcattaagctgcctaagtattcactcttcgagctggaaaatggtcgtaaacgcatgctcgcttctgccggcgagttgcagaagggcaatgaattagcacttccatcaaagtacgttaacttcctgtatttggccagccattacgagaaactgaaggggtctccagaggacaacgaacagaaacaattatttgtagagcagcacaagcattatcttgatgaaatcattgagcaaatttccgaattcagtaaacgcgtaatcctggccgatgcaaacctcgacaaggtgctgagcgcttacaataagcatcgcgacaaacctatccgtgagcaggctgaaaatatcattcacctgttcacattaacgaacctgggcgctccggccgcttttaaatatttcgacacgacaatcgaccgtaagcgctataccagtacgaaagaagtgttggatgcgacccttattcaccagtcaattacaggattatatgagacccgtatcgaccttagccaattaggtggggatgcgccagcgcctgctcctgcacccgctccagctcctgccccagctccagcgcccgctcctgctcctgcacctgcgatggttagcaaaggtgaagaactgtttaccggcgttgtgccgattctggtggaactggatggtgatgtgaatggccataaatttagcgttagcggcgaaggcgaaggtgatgcgacctatggtaaactgaccctgaaatttatttgcaccaccggtaaactgccggttccgtggccgaccctggtgaccaccctgacctatggcgttcagtgctttagccgctatccggatcatatgaaacagcatgatttctttaaaagcgcgatgccggaaggctatgtgcaggaacgtaccatttttttcaaagatgatggcaactataaaacccgtgcggaagttaaatttgaaggcgataccctggtgaaccgcattgaactgaaaggtattgattttaaagaagatggcaacattctgggtcataaactggaatataattacaacagccataatgtgtatattatggccgataaacagaaaaatggcatcaaagtgaactttaaaatccgtcacaacattgaagatggtagcgtgcagctggcggatcattatcagcagaataccccgattggtgatggcccggtgctgctgccggataatcattatctgagcacccagagcgcgctgagcaaagatccgaatgaaaaacgtgatcatatggtgctgctggaatttgttaccgccgcgggcattaccctgggtatggatgaactgtataaa

SEQ ID NO: 366 - DNA, 4902 bp, synthetic construct
  misc_feature 1..4902: note = SYNTHETIC
  source 1..4902: mol_type = other DNA
atggacaaaaagtactctattggcctggatatcgggaccaacagcgtcgggtgggctgttatcaccgacgagtataaagtaccttcgaaaaagttcaaagtgctgggcaacaccgatcgccattcaatcaaaaagaacttgattggtgcgctgttgtttgactccggggaaaccgccgaggcgactcgccttaaacgtacagcacgtcgccggtacactcggcgtaagaatcgcatttgctatttgcaggaaatctttagcaacgagatggcaaaagtcgatgactcgtttttccaccgcctcgaggaaagctttctggtggaggaagacaaaaagcatgagcgtcacccgatcttcggcaacattgtcgatgaagtagcgtatcatgaaaaatacccaaccatttaccacttacgcaaaaagctggtggacagcactgacaaagctgatttgcgccttatctatttagccctggcacatatgattaagtttcgtggtcacttcctgatcgaaggagacttaaatcccgacaacagtgatgttgataaattgtttattcagcttgtccaaacttacaatcaactgttcgaggaaaacccgatcaatgcctccggtgtggatgcaaaagccattttaagtgcacgccttagcaagtcccgtcgcttagaaaaccttatcgcgcagctgcccggcgagaaaaagaatggtttgtttgggaaccttattgccttgagcttaggcctcaccccgaatttcaaaagtaatttcgatcttgcagaagacgccaaattacaactgtcgaaggatacttatgatgacgatctcgataatctgttagcgcagattggtgaccaatacgccgatctttttctggcggctaaaaatctgagcgacgccatcttgctttcggatattctccgcgttaacaccgaaatcacgaaagcgcctcttagtgccagcatgattaaacgttatgatgaacaccaccaggacctgaccttactcaaagcgttggttcgccagcaactgccagagaagtacaaagaaatcttctttgatcagtcaaagaatggttatgccggctatattgacgggggtgcaagccaagaggaattctacaaatttatcaagcctattctggagaaaatggatggcaccgaagagttattggtgaagcttaaccgtgaagacctcctgcggaaacagcgcacattcgataatggttcgatcccacaccaaatccatttgggggagttacacgctattttgcgtcgccaggaagacttttaccctttcctgaaggataaccgggagaaaattgagaagatccttacctttcgtattccgtattacgtaggccccttagcacggggtaatagccgtttcgcgtggatgacacggaagtcggaagagacgatcaccccgtggaacttcgaagaggtagtcgacaagggcgcatcagcgcagtcttttattgaacgtatgacgaatttcgataaaaacttgcccaatgagaaggtgcttccgaaacattccttgttatatgaatattttacagtttacaacgagctgaccaaggttaaatacgtgacggaaggaatgcgcaagcccgcttttcttagcggtgagcaaaaaaaggcgatcgtcgacctgttattcaaaacgaatcgtaaggtgactgtaaagcaactcaaagaagattacttcaaaaagattgagtgcttcgacagcgtcgaaatctctggggtagaggatcggtttaacgcaagtttaggtacctaccatgacctgcttaaaatcattaaggataaagacttcttagataatgaagagaacgaagatattctcgaggacatcgtcttgacgttaaccttatttgaggatcgtgaaatgattgaggaacgcctcaaaacttatgcccacctgttcgacgataaggtgatgaagcagctgaaacgtcggcgctacacaggatggggccgcttgagtcgcaaacttattaacggaatccgtgacaagcaatccggcaaaacgattctggatttcttgaagtcggacggatttgctaatcgcaacttcatgcagttgatccatgatgactccctgacttttaaagaggatattcaaaaggcgcaggttagtggtcaaggcgacagcttacacgaacacatcgcaaatttggctggttcgccggccattaaaaaggggatcctccagaccgtgaaagttgtagatgagcttgttaaggtcatgggtcgtcataagcccgaaaacatcgtgattgaaatggcgcgggagaatcaaacgacccagaaaggacaaaagaatagccgtgaacggatgaagcggatcgaggaaggcattaaagagctggggtctcaaatcttgaaggaacaccctgtggagaacactcagctccaaaatgaaaaactttacctgtactatttgcagaacggacgcgatatgtacgtggaccaagagttggatattaatcggctgagtgactacgacgttgatcatatcgtcccgcagagcttcctcaaagacgattctattgacaataaggtactgacgcgctctgataaaaaccgtggtaagtcggacaacgtgccctccgaagaggttgtgaaaaagatgaaaaattattggcgccagcttttaaacgcgaagctgatcacacaacgtaaattcgataatttgaccaaggctgaacggggtggcctgagcgagttagataaggcaggatttattaaacgccagttagtggagactcgtcaaatcaccaaacatgtcgcgcagattttggacagccggatgaacaccaagtacgatgaaaatgacaaactgatccgtgaggtgaaagtcattactctgaagtccaaattagttagtgatttccggaaggactttcaattctacaaagtccgtgaaattaataactatcatcacgcacatgacgcgtacctgaatgcagtggttgggaccgcccttatcaagaaatatcctaagctggagtcggagtttgtctatggcgactataaggtatacgatgttcgcaaaatgattgcgaaatctgagcaggagatcggtaaggcaaccgcaaaatatttcttttactcaaacattatgaatttctttaagacagaaatcactctggccaacggggagattcgcaaacgtccgttgatcgaaacaaacggcgagactggcgaaattgtttgggacaaagggcgtgatttcgcgacggtgcgcaaggtactgagcatgcctcaagtcaatattgttaagaaaaccgaagtgcagacgggcgggttttccaaggaaagcatcttacccaaacgtaattcagataaacttattgcacgcaaaaaggactgggatccgaaaaagtatggaggcttcgacagtccaaccgtagcctactctgttctcgttgtagcgaaagtagaaaagggtaaatccaagaaactgaaatctgtcaaggagttgcttggaatcaccattatggagcgtagctccttcgagaagaacccgattgactttctggaagccaaaggatataaagaggtcaagaaagatcttatcattaagctgcctaagtattcactcttcgagctggaaaatggtcgtaaacgcatgctcgcttctgccggcgagttgcagaagggcaatgaattagcacttccatcaaagtacgttaacttcctgtatttggccagccattacgagaaactgaaggggtctccagaggacaacgaacagaaacaattatttgtagagcagcacaagcattatcttgatgaaatcattgagcaaatttccgaattcagtaaacgcgtaatcctggccgatgcaaacctcgacaaggtgctgagcgcttacaataagcatcgcgacaaacctatccgtgagcaggctgaaaatatcattcacctgttcacattaacgaacctgggcgctccggccgcttttaaatatttcgacacgacaatcgaccgtaagcgctataccagtacgaaagaagtgttggatgcgacccttattcaccagtcaattacaggattatatgagacccgtatcgaccttagccaattaggtggggatgcgccagcgcctgctcctgcacccgctccagctcctgccccagctccagcgcccgctcctgcgccagctcctgcacctgcgatggttagcaaaggtgaagaactgtttaccggcgttgtgccgattctggtggaactggatggtgatgtgaatggccataaatttagcgttagcggcgaaggcgaaggtgatgcgacctatggtaaactgaccctgaaatttatttgcaccaccggtaaactgccggttccgtggccgaccctggtgaccaccctgacctatggcgttcagtgctttagccgctatccggatcatatgaaacagcatgatttctttaaaagcgcgatgccggaaggctatgtgcaggaacgtaccatttttttcaaagatgatggcaactataaaacccgtgcggaagttaaatttgaaggcgataccctggtgaaccgcattgaactgaaaggtattgattttaaagaagatggcaacattctgggtcataaactggaatataattacaacagccataatgtgtatattatggccgataaacagaaaaatggcatcaaagtgaactttaaaatccgtcacaacattgaagatggtagcgtgcagctggcggatcattatcagcagaataccccgattggtgatggcccggtgctgctgccggataatcattatctgagcacccagagcgcgctgagcaaagatccgaatgaaaaacgtgatcatatggtgctgctggaatttgttaccgccgcgggcattaccctgggtatggatgaactgtataaa

SEQ ID NO: 367 - DNA, 4908 bp, synthetic construct
  misc_feature 1..4908: note = SYNTHETIC
  source 1..4908: mol_type = other DNA
atggacaaaaagtactctattggcctggatatcgggaccaacagcgtcgggtgggctgttatcaccgacgagtataaagtaccttcgaaaaagttcaaagtgctgggcaacaccgatcgccattcaatcaaaaagaacttgattggtgcgctgttgtttgactccggggaaaccgccgaggcgactcgccttaaacgtacagcacgtcgccggtacactcggcgtaagaatcgcatttgctatttgcaggaaatctttagcaacgagatggcaaaagtcgatgactcgtttttccaccgcctcgaggaaagctttctggtggaggaagacaaaaagcatgagcgtcacccgatcttcggcaacattgtcgatgaagtagcgtatcatgaaaaatacccaaccatttaccacttacgcaaaaagctggtggacagcactgacaaagctgatttgcgccttatctatttagccctggcacatatgattaagtttcgtggtcacttcctgatcgaaggagacttaaatcccgacaacagtgatgttgataaattgtttattcagcttgtccaaacttacaatcaactgttcgaggaaaacccgatcaatgcctccggtgtggatgcaaaagccattttaagtgcacgccttagcaagtcccgtcgcttagaaaaccttatcgcgcagctgcccggcgagaaaaagaatggtttgtttgggaaccttattgccttgagcttaggcctcaccccgaatttcaaaagtaatttcgatcttgcagaagacgccaaattacaactgtcgaaggatacttatgatgacgatctcgataatctgttagcgcagattggtgaccaatacgccgatctttttctggcggctaaaaatctgagcgacgccatcttgctttcggatattctccgcgttaacaccgaaatcacgaaagcgcctcttagtgccagcatgattaaacgttatgatgaacaccaccaggacctgaccttactcaaagcgttggttcgccagcaactgccagagaagtacaaagaaatcttctttgatcagtcaaagaatggttatgccggctatattgacgggggtgcaagccaagaggaattctacaaatttatcaagcctattctggagaaaatggatggcaccgaagagttattggtgaagcttaaccgtgaagacctcctgcggaaacagcgcacattcgataatggttcgatcccacaccaaatccatttgggggagttacacgctattttgcgtcgccaggaagacttttaccctttcctgaaggataaccgggagaaaattgagaagatccttacctttcgtattccgtattacgtaggccccttagcacggggtaatagccgtttcgcgtggatgacacggaagtcggaagagacgatcaccccgtggaacttcgaagaggtagtcgacaagggcgcatcagcgcagtcttttattgaacgtatgacgaatttcgataaaaacttgcccaatgagaaggtgcttccgaaacattccttgttatatgaatattttacagtttacaacgagctgaccaaggttaaatacgtgacggaaggaatgcgcaagcccgcttttcttagcggtgagcaaaaaaaggcgatcgtcgacctgttattcaaaacgaatcgtaaggtgactgtaaagcaactcaaagaagattacttcaaaaagattgagtgcttcgacagcgtcgaaatctctggggtagaggatcggtttaacgcaagtttaggtacctaccatgacctgcttaaaatcattaaggataaagacttcttagataatgaagagaacgaagatattctcgaggacatcgtcttgacgttaaccttatttgaggatcgtgaaatgattgaggaacgcctcaaaacttatgcccacctgttcgacgataaggtgatgaagcagctgaaacgtcggcgctacacaggatggggccgcttgagtcgcaaacttattaacggaatccgtgacaagcaatccggcaaaacgattctggatttcttgaagtcggacggatttgctaatcgcaacttcatgcagttgatccatgatgactccctgacttttaaagaggatattcaaaaggcgcaggttagtggtcaaggcgacagcttacacgaacacatcgcaaatttggctggttcgccggccattaaaaaggggatcctccagaccgtgaaagttgtagatgagcttgttaaggtcatgggtcgtcataagcccgaaaacatcgtgattgaaatggcgcgggagaatcaaacgacccagaaaggacaaaagaatagccgtgaacggatgaagcggatcgaggaaggcattaaagagctggggtctcaaatcttgaaggaacaccctgtggagaacactcagctccaaaatgaaaaactttacctgtactatttgcagaacggacgcgatatgtacgtggaccaagagttggatattaatcggctgagtgactacgacgttgatcatatcgtcccgcagagcttcctcaaagacgattctattgacaataaggtactgacgcgctctgataaaaaccgtggtaagtcggacaacgtgccctccgaagaggttgtgaaaaagatgaaaaattattggcgccagcttttaaacgcgaagctgatcacacaacgtaaattcgataatttgaccaaggctgaacggggtggcctgagcgagttagataaggcaggatttattaaacgccagttagtggagactcgtcaaatcaccaaacatgtcgcgcagattttggacagccggatgaacaccaagtacgatgaaaatgacaaactgatccgtgaggtgaaagtcattactctgaagtccaaattagttagtgatttccggaaggactttcaattctacaaagtccgtgaaattaataactatcatcacgcacatgacgcgtacctgaatgcagtggttgggaccgcccttatcaagaaatatcctaagctggagtcggagtttgtctatggcgactataaggtatacgatgttcgcaaaatgattgcgaaatctgagcaggagatcggtaaggcaaccgcaaaatatttcttttactcaaacattatgaatttctttaagacagaaatcactctggccaacggggagattcgcaaacgtccgttgatcgaaacaaacggcgagactggcgaaattgtttgggacaaagggcgtgatttcgcgacggtgcgcaaggtactgagcatgcctcaagtcaatattgttaagaaaaccgaagtgcagacgggcgggttttccaaggaaagcatcttacccaaacgtaattcagataaacttattgcacgcaaaaaggactgggatccgaaaaagtatggaggcttcgacagtccaaccgtagcctactctgttctcgttgtagcgaaagtagaaaagggtaaatccaagaaactgaaatctgtcaaggagttgcttggaatcaccattatggagcgtagctccttcgagaagaacccgattgactttctggaagccaaaggatataaagaggtcaagaaagatcttatcattaagctgcctaagtattcactcttcgagctggaaaatggtcgtaaacgcatgctcgcttctgccggcgagttgcagaagggcaatgaattagcacttccatcaaagtacgttaacttcctgtatttggccagccattacgagaaactgaaggggtctccagaggacaacgaacagaaacaattatttgtagagcagcacaagcattatcttgatgaaatcattgagcaaatttccgaattcagtaaacgcgtaatcctggccgatgcaaacctcgacaaggtgctgagcgcttacaataagcatcgcgacaaacctatccgtgagcaggctgaaaatatcattcacctgttcacattaacgaacctgggcgctccggccgcttttaaatatttcgacacgacaatcgaccgtaagcgctataccagtacgaaagaagtgttggatgcgacccttattcaccagtcaattacaggattatatgagacccgtatcgaccttagccaattaggtggggatgcgccagcgcctgctcctgcacccgctccagctcctgccccagctccagcgcccgctcctgcgccagctcctgcacctgctccagcgatggttagcaaaggtgaagaactgtttaccggcgttgtgccgattctggtggaactggatggtgatgtgaatggccataaatttagcgttagcggcgaaggcgaaggtgatgcgacctatggtaaactgaccctgaaatttatttgcaccaccggtaaactgccggttccgtggccgaccctggtgaccaccctgacctatggcgttcagtgctttagccgctatccggatcatatgaaacagcatgatttctttaaaagcgcgatgccggaaggctatgtgcaggaacgtaccatttttttcaaagatgatggcaactataaaacccgtgcggaagttaaatttgaaggcgataccctggtgaaccgcattgaactgaaaggtattgattttaaagaagatggcaacattctgggtcataaactggaatataattacaacagccataatgtgtatattatggccgataaacagaaaaatggcatcaaagtgaactttaaaatccgtcacaacattgaagatggtagcgtgcagctggcggatcattatcagcagaataccccgattggtgatggcccggtgctgctgccggataatcattatctgagcacccagagcgcgctgagcaaagatccgaatgaaaaacgtgatcatatggtgctgctggaatttgttaccgccgcgggcattaccctgggtatggatgaactgtataaa

SEQ ID NO: 368 - DNA, 4848 bp, synthetic construct
  misc_feature 1..4848: note = SYNTHETIC
  source 1..4848: mol_type = other DNA
atggacaaaaagtactctattggcctggatatcgggaccaacagcgtcgggtgggctgttatcaccgacgagtataaagtaccttcgaaaaagttcaaagtgctgggcaacaccgatcgccattcaatcaaaaagaacttgattggtgcgctgttgtttgactccggggaaaccgccgaggcgactcgccttaaacgtacagcacgtcgccggtacactcggcgtaagaatcgcatttgctatttgcaggaaatctttagcaacgagatggcaaaagtcgatgactcgtttttccaccgcctcgaggaaagctttctggtggaggaagacaaaaagcatgagcgtcacccgatcttcggcaacattgtcgatgaagtagcgtatcatgaaaaatacccaaccatttaccacttacgcaaaaagctggtggacagcactgacaaagctgatttgcgccttatctatttagccctggcacatatgattaagtttcgtggtcacttcctgatcgaaggagacttaaatcccgacaacagtgatgttgataaattgtttattcagcttgtccaaacttacaatcaactgttcgaggaaaacccgatcaatgcctccggtgtggatgcaaaagccattttaagtgcacgccttagcaagtcccgtcgcttagaaaaccttatcgcgcagctgcccggcgagaaaaagaatggtttgtttgggaaccttattgccttgagcttaggcctcaccccgaatttcaaaagtaatttcgatcttgcagaagacgccaaattacaactgtcgaaggatacttatgatgacgatctcgataatctgttagcgcagattggtgaccaatacgccgatctttttctggcggctaaaaatctgagcgacgccatcttgctttcggatattctccgcgttaacaccgaaatcacgaaagcgcctcttagtgccagcatgattaaacgttatgatgaacaccaccaggacctgaccttactcaaagcgttggttcgccagcaactgccagagaagtacaaagaaatcttctttgatcagtcaaagaatggttatgccggctatattgacgggggtgcaagccaagaggaattctacaaatttatcaagcctattctggagaaaatggatggcaccgaagagttattggtgaagcttaaccgtgaagacctcctgcggaaacagcgcacattcgataatggttcgatcccacaccaaatccatttgggggagttacacgctattttgcgtcgccaggaagacttttaccctttcctgaaggataaccgggagaaaattgagaagatccttacctttcgtattccgtattacgtaggccccttagcacggggtaatagccgtttcgcgtggatgacacggaagtcggaagagacgatcaccccgtggaacttcgaagaggtagtcgacaagggcgcatcagcgcagtcttttattgaacgtatgacgaatttcgataaaaacttgcccaatgagaaggtgcttccgaaacattccttgttatatgaatattttacagtttacaacgagctgaccaaggttaaatacgtgacggaaggaatgcgcaagcccgcttttcttagcggtgagcaaaaaaaggcgatcgtcgacctgttattcaaaacgaatcgtaaggtgactgtaaagcaactcaaagaagattacttcaaaaagattgagtgcttcgacagcgtcgaaatctctggggtagaggatcggtttaacgcaagtttaggtacctaccatgacctgcttaaaatcattaaggataaagacttcttagataatgaagagaacgaagatattctcgaggacatcgtcttgacgttaaccttatttgaggatcgtgaaatgattgaggaacgcctcaaaacttatgcccacctgttcgacgataaggtgatgaagcagctgaaacgtcggcgctacacaggatggggccgcttgagtcgcaaacttattaacggaatccgtgacaagcaatccggcaaaacgattctggatttcttgaagtcggacggatttgctaatcgcaacttcatgcagttgatccatgatgactccctgacttttaaagaggatattcaaaaggcgcaggttagtggtcaaggcgacagcttacacgaacacatcgcaaatttggctggttcgccggccattaaaaaggggatcctccagaccgtgaaagttgtagatgagcttgttaaggtcatgggtcgtcataagcccgaaaacatcgtgattgaaatggcgcgggagaatcaaacgacccagaaaggacaaaagaatagccgtgaacggatgaagcggatcgaggaaggcattaaagagctggggtctcaaatcttgaaggaacaccctgtggagaacactcagctccaaaatgaaaaactttacctgtactatttgcagaacggacgcgatatgtacgtggaccaagagttggatattaatcggctgagtgactacgacgttgatcatatcgtcccgcagagcttcctcaaagacgattctattgacaataaggtactgacgcgctctgataaaaaccgtggtaagtcggacaacgtgccctccgaagaggttgtgaaaaagatgaaaaattattggcgccagcttttaaacgcgaagctgatcacacaacgtaaattcgataatttgaccaaggctgaacggggtggcctgagcgagttagataaggcaggatttattaaacgccagttagtggagactcgtcaaatcaccaaacatgtcgcgcagattttggacagccggatgaacaccaagtacgatgaaaatgacaaactgatccgtgaggtgaaagtcattactctgaagtccaaattagttagtgatttccggaaggactttcaattctacaaagtccgtgaaattaataactatcatcacgcacatgacgcgtacctgaatgcagtggttgggaccgcccttatcaagaaatatcctaagctggagtcggagtttgtctatggcgactataaggtatacgatgttcgcaaaatgattgcgaaatctgagcaggagatcggtaaggcaaccgcaaaatatttcttttactcaaacattatgaatttctttaagacagaaatcactctggccaacggggagattcgcaaacgtccgttgatcgaaacaaacggcgagactggcgaaattgtttgggacaaagggcgtgatttcgcgacggtgcgcaaggtactgagcatgcctcaagtcaatattgttaagaaaaccgaagtgcagacgggcgggttttccaaggaaagcatcttacccaaacgtaattcagataaacttattgcacgcaaaaaggactgggatccgaaaaagtatggaggcttcgacagtccaaccgtagcctactctgttctcgttgtagcgaaagtagaaaagggtaaatccaagaaactgaaatctgtcaaggagttgcttggaatcaccattatggagcgtagctccttcgagaagaacccgattgactttctggaagccaaaggatataaagaggtcaagaaagatcttatcattaagctgcctaagtattcactcttcgagctggaaaatggtcgtaaacgcatgctcgcttctgccggcgagttgcagaagggcaatgaattagcacttccatcaaagtacgttaacttcctgtatttggccagccattacgagaaactgaaggggtctccagaggacaacgaacagaaacaattatttgtagagcagcacaagcattatcttgatgaaatcattgagcaaatttccgaattcagtaaacgcgtaatcctggccgatgcaaacctcgacaaggtgctgagcgcttacaataagcatcgcgacaaacctatccgtgagcaggctgaaaatatcattcacctgttcacattaacgaacctgggcgctccggccgcttttaaatatttcgacacgacaatcgaccgtaagcgctataccagtacgaaagaagtgttggatgcgacccttattcaccagtcaattacaggattatatgagacccgtatcgaccttagccaattaggtggggatggtagcgcaggtagtgcagcaggtagcggtgaatttatggtgagcaaaggtgaagaggataatatggccatcatcaaagaattcatgcgcttcaaagttcatatggaaggtagcgttaatggccacgaatttgaaattgaaggtgaaggcgaaggtcgtccgtatgaaggcacccagaccgcaaaactgaaagttaccaaaggtggtccgctgccgtttgcatgggatattctgagtccgcagtttatgtatggtagcaaagcctatgttaaacatccggcagatatcccggattatctgaaactgagctttccggaaggttttaaatgggaacgtgtgatgaattttgaagatggtggtgttgttaccgttacacaggatagcagcctgcaggatggtgaatttatctataaagttaaactgcgtggcacgaattttccgagtgatggtccggttatgcagaaaaaaaccatgggttgggaagcaagcagcgaacgtatgtatccggaagatggcgcactgaaaggtgaaattaaacagcgtctgaagctgaaagatggcggtcattatgatgcagaagttaaaaccacctacaaagccaaaaaaccggttcagctgcctggtgcatataacgttaacattaaactggatatcaccagccacaacgaggattataccattgttgaacagtatgaacgtgcagaaggtcgccatagtaccggtggtatggatgaactgtataaa

SEQ ID NO: 369 - DNA, 4872 bp, synthetic construct
  misc_feature 1..4872: note = SYNTHETIC
  source 1..4872: mol_type = other DNA
atggacaaaaagtactctattggcctggatatcgggaccaacagcgtcgggtgggctgttatcaccgacgagtataaagtaccttcgaaaaagttcaaagtgctgggcaacaccgatcgccattcaatcaaaaagaacttgattggtgcgctgttgtttgactccggggaaaccgccgaggcgactcgccttaaacgtacagcacgtcgccggtacactcggcgtaagaatcgcatttgctatttgcaggaaatctttagcaacgagatggcaaaagtcgatgactcgtttttccaccgcctcgaggaaagctttctggtggaggaagacaaaaagcatgagcgtcacccgatcttcggcaacattgtcgatgaagtagcgtatcatgaaaaatacccaaccatttaccacttacgcaaaaagctggtggacagcactgacaaagctgatttgcgccttatctatttagccctggcacatatgattaagtttcgtggtcacttcctgatcgaaggagacttaaatcccgacaacagtgatgttgataaattgtttattcagcttgtccaaacttacaatcaactgttcgaggaaaacccgatcaatgcctccggtgtggatgcaaaagccattttaagtgcacgccttagcaagtcccgtcgcttagaaaaccttatcgcgcagctgcccggcgagaaaaagaatggtttgtttgggaaccttattgccttgagcttaggcctcaccccgaatttcaaaagtaatttcgatcttgcagaagacgccaaattacaactgtcgaaggatacttatgatgacgatctcgataatctgttagcgcagattggtgaccaatacgccgatctttttctggcggctaaaaatctgagcgacgccatcttgctttcggatattctccgcgttaacaccgaaatcacgaaagcgcctcttagtgccagcatgattaaacgttatgatgaacaccaccaggacctgaccttactcaaagcgttggttcgccagcaactgccagagaagtacaaagaaatcttctttgatcagtcaaagaatggttatgccggctatattgacgggggtgcaagccaagaggaattctacaaatttatcaagcctattctggagaaaatggatggcaccgaagagttattggtgaagcttaaccgtgaagacctcctgcggaaacagcgcacattcgataatggttcgatcccacaccaaatccatttgggggagttacacgctattttgcgtcgccaggaagacttttaccctttcctgaaggataaccgggagaaaattgagaagatccttacctttcgtattccgtattacgtaggccccttagcacggggtaatagccgtttcgcgtggatgacacggaagtcggaagagacgatcaccccgtggaacttcgaagaggtagtcgacaagggcgcatcagcgcagtcttttattgaacgtatgacgaatttcgataaaaacttgcccaatgagaaggtgcttccgaaacattccttgttatatgaatattttacagtttacaacgagctgaccaaggttaaatacgtgacggaaggaatgcgcaagcccgcttttcttagcggtgagcaaaaaaaggcgatcgtcgacctgttattcaaaacgaatcgtaaggtgactgtaaagcaactcaaagaagattacttcaaaaagattgagtgcttcgacagcgtcgaaatctctggggtagaggatcggtttaacgcaagtttaggtacctaccatgacctgcttaaaatcattaaggataaagacttcttagataatgaagagaacgaagatattctcgaggacatcgtcttgacgttaaccttatttgaggatcgtgaaatgattgaggaacgcctcaaaacttatgcccacctgttcgacgataaggtgatgaagcagctgaaacgtcggcgctacacaggatggggccgcttgagtcgcaaacttattaacggaatccgtgacaagcaatccggcaaaacgattctggatttcttgaagtcggacggatttgctaatcgcaacttcatgcagttgatccatgatgactccctgacttttaaagaggatattcaaaaggcgcaggttagtggtcaaggcgacagcttacacgaacacatcgcaaatttggctggttcgccggccattaaaaaggggatcctccagaccgtgaaagttgtagatgagcttgttaaggtcatgggtcgtcataagcccgaaaacatcgtgattgaaatggcgcgggagaatcaaacgacccagaaaggacaaaagaatagccgtgaacggatgaagcggatcgaggaaggcattaaagagctggggtctcaaatcttgaaggaacaccctgtggagaacactcagctccaaaatgaaaaactttacctgtactatttgcagaacggacgcgatatgtacgtggaccaagagttggatattaatcggctgagtgactacgacgttgatcatatcgtcccgcagagcttcctcaaagacgattctattgacaataaggtactgacgcgctctgataaaaaccgtggtaagtcggacaacgtgccctccgaagaggttgtgaaaaagatgaaaaattattggcgccagcttttaaacgcgaagctgatcacacaacgtaaattcgataatttgaccaaggctgaacggggtggcctgagcgagttagataaggcaggatttattaaacgccagttagtggagactcgtcaaatcaccaaacatgtcgcgcagattttggacagccggatgaacaccaagtacgatgaaaatgacaaactgatccgtgaggtgaaagtcattactctgaagtccaaattagttagtgatttccggaaggactttcaattctacaaagtccgtgaaattaataactatcatcacgcacatgacgcgtacctgaatgcagtggttgggaccgcccttatcaagaaatatcctaagctggagtcggagtttgtctatggcgactataaggtatacgatgttcgcaaaatgattgcgaaatctgagcaggagatcggtaaggcaaccgcaaaatatttcttttactcaaacattatgaatttctttaagacagaaatcactctggccaacggggagattcgcaaacgtccgttgatcgaaacaaacggcgagactggcgaaattgtttgggacaaagggcgtgatttcgcgacggtgcgcaaggtactgagcatgcctcaagtcaatattgttaagaaaaccgaagtgcagacgggcgggttttccaaggaaagcatcttacccaaacgtaattcagataaacttattgcacgcaaaaaggactgggatccgaaaaagtatggaggcttcgacagtccaaccgtagcctactctgttctcgttgtagcgaaagtagaaaagggtaaatccaagaaactgaaatctgtcaaggagttgcttggaatcaccattatggagcgtagctccttcgagaagaacccgattgactttctggaagccaaaggatataaagaggtcaagaaagatcttatcattaagctgcctaagtattcactcttcgagctggaaaatggtcgtaaacgcatgctcgcttctgccggcgagttgcagaagggcaatgaattagcacttccatcaaagtacgttaacttcctgtatttggccagccattacgagaaactgaaggggtctccagaggacaacgaacagaaacaattatttgtagagcagcacaagcattatcttgatgaaatcattgagcaaatttccgaattcagtaaacgcgtaatcctggccgatgcaaacctcgacaaggtgctgagcgcttacaataagcatcgcgacaaacctatccgtgagcaggctgaaaatatcattcacctgttcacattaacgaacctgggcgctccggccgcttttaaatatttcgacacgacaatcgaccgtaagcgctataccagtacgaaagaagtgttggatgcgacccttattcaccagtcaattacaggattatatgagacccgtatcgaccttagccaattaggtggggatggaggcggaggatcaggcggtggcggaagtggtggaggtgggtcgggaggtggtggtagcatggtgagcaaaggtgaagaggataatatggccatcatcaaagaattcatgcgcttcaaagttcatatggaaggtagcgttaatggccacgaatttgaaattgaaggtgaaggcgaaggtcgtccgtatgaaggcacccagaccgcaaaactgaaagttaccaaaggtggtccgctgccgtttgcatgggatattctgagtccgcagtttatgtatggtagcaaagcctatgttaaacatccggcagatatcccggattatctgaaactgagctttccggaaggttttaaatgggaacgtgtgatgaattttgaagatggtggtgttgttaccgttacacaggatagcagcctgcaggatggtgaatttatctataaagttaaactgcgtggcacgaattttccgagtgatggtccggttatgcagaaaaaaaccatgggttgggaagcaagcagcgaacgtatgtatccggaagatggcgcactgaaaggtgaaattaaacagcgtctgaagctgaaagatggcggtcattatgatgcagaagttaaaaccacctacaaagccaaaaaaccggttcagctgcctggtgcatataacgttaacattaaactggatatcaccagccacaacgaggattataccattgttgaacagtatgaacgtgcagaaggtcgccatagtaccggtggtatggatgaactgtataaa

SEQ ID NO: 370 - DNA, 4857 bp, synthetic construct
  misc_feature 1..4857: note = SYNTHETIC
  source 1..4857: mol_type = other DNA
atggacaaaaagtactctattggcctggatatcgggaccaacagcgtcgggtgggctgttatcaccgacgagtataaagtaccttcgaaaaagttcaaagtgctgggcaacaccgatcgccattcaatcaaaaagaacttgattggtgcgctgttgtttgactccggggaaaccgccgaggcgactcgccttaaacgtacagcacgtcgccggtacactcggcgtaagaatcgcatttgctatttgcaggaaatctttagcaacgagatggcaaaagtcgatgactcgtttttccaccgcctcgaggaaagctttctggtggaggaagacaaaaagcatgagcgtcacccgatcttcggcaacattgtcgatgaagtagcgtatcatgaaaaatacccaaccatttaccacttacgcaaaaagctggtggacagcactgacaaagctgatttgcgccttatctatttagccctggcacatatgattaagtttcgtggtcacttcctgatcgaaggagacttaaatcccgacaacagtgatgttgataaattgtttattcagcttgtccaaacttacaatcaactgttcgaggaaaacccgatcaatgcctccggtgtggatgcaaaagccattttaagtgcacgccttagcaagtcccgtcgcttagaaaaccttatcgcgcagctgcccggcgagaaaaagaatggtttgtttgggaaccttattgccttgagcttaggcctcaccccgaatttcaaaagtaatttcgatcttgcagaagacgccaaattacaactgtcgaaggatacttatgatgacgatctcgataatctgttagcgcagattggtgaccaatacgccgatctttttctggcggctaaaaatctgagcgacgccatcttgctttcggatattctccgcgttaacaccgaaatcacgaaagcgcctcttagtgccagcatgattaaacgttatgatgaacaccaccaggacctgaccttactcaaagcgttggttcgccagcaactgccagagaagtacaaagaaatcttctttgatcagtcaaagaatggttatgccggctatattgacgggggtgcaagccaagaggaattctacaaatttatcaagcctattctggagaaaatggatggcaccgaagagttattggtgaagcttaaccgtgaagacctcctgcggaaacagcgcacattcgataatggttcgatcccacaccaaatccatttgggggagttacacgctattttgcgtcgccaggaagacttttaccctttcctgaaggataaccgggagaaaattgagaagatccttacctttcgtattccgtattacgtaggccccttagcacggggtaatagccgtttcgcgtggatgacacggaagtcggaagagacgatcaccccgtggaacttcgaagaggtagtcgacaagggcgcatcagcgcagtcttttattgaacgtatgacgaatttcgataaaaacttgcccaatgagaaggtgcttccgaaacattccttgttatatgaatattttacagtttacaacgagctgaccaaggttaaatacgtgacggaaggaatgcgcaagcccgcttttcttagcggtgagcaaaaaaaggcgatcgtcgacctgttattcaaaacgaatcgtaaggtgactgtaaagcaactcaaagaagattacttcaaaaagattgagtgcttcgacagcgtcgaaatctctggggtagaggatcggtttaacgcaagtttaggtacctaccatgacctgcttaaaatcattaaggataaagacttcttagataatgaagagaacgaagatattctcgaggacatcgtcttgacgttaaccttatttgaggatcgtgaaatgattgaggaacgcctcaaaacttatgcccacctgttcgacgataaggtgatgaagcagctgaaacgtcggcgctacacaggatggggccgcttgagtcgcaaacttattaacggaatccgtgacaagcaatccggcaaaacgattctggatttcttgaagtcggacggatttgctaatcgcaacttcatgcagttgatccatgatgactccctgacttttaaagaggatattcaaaaggcgcaggttagtggtcaaggcgacagcttacacgaacacatcgcaaatttggctggttcgccggccattaaaaaggggatcctccagaccgtgaaagttgtagatgagcttgttaaggtcatgggtcgtcataagcccgaaaacatcgtgattgaaatggcgcgggagaatcaaacgacccagaaaggacaaaagaatagccgtgaacggatgaagcggatcgaggaaggcattaaagagctggggtctcaaatcttgaaggaacaccctgtggagaacactcagctccaaaatgaaaaactttacctgtactatttgcagaacggacgcgatatgtacgtggaccaagagttggatattaatcggctgagtgactacgacgttgatcatatcgtcccgcagagcttcctcaaagacgattctattgacaataaggtactgacgcgctctgataaaaaccgtggtaagtcggacaacgtgccctccgaagaggttgtgaaaaagatgaaaaattattggcgccagcttttaaacgcgaagctgatcacacaacgtaaattcgataatttgaccaaggctgaacggggtggcctgagcgagttagataaggcaggatttattaaacgccagttagtggagactcgtcaaatcaccaaacatgtcgcgcagattttggacagccggatgaacaccaagtacgatgaaaatgacaaactgatccgtgaggtgaaagtcattactctgaagtccaaattagttagtgatttccggaaggactttcaattctacaaagtccgtgaaattaataactatcatcacgcacatgacgcgtacctgaatgcagtggttgggaccgcccttatcaagaaatatcctaagctggagtcggagtttgtctatggcgactataaggtatacgatgttcgcaaaatgattgcgaaatctgagcaggagatcggtaaggcaaccgcaaaatatttcttttactcaaacattatgaatttctttaagacagaaatcactctggccaacggggagattcgcaaacgtccgttgatcgaaacaaacggcgagactggcgaaattgtttgggacaaagggcgtgatttcgcgacggtgcgcaaggtactgagcatgcctcaagtcaatattgttaagaaaaccgaagtgcagacgggcgggttttccaaggaaagcatcttacccaaacgtaattcagataaacttattgcacgcaaaaaggactgggatccgaaaaagtatggaggcttcgacagtccaaccgtagcctactctgttctcgttgtagcgaaagtagaaaagggtaaatccaagaaactgaaatctgtcaaggagttgcttggaatcaccattatggagcgtagctccttcgagaagaacccgattgactttctggaagccaaaggatataaagaggtcaagaaagatcttatcattaagctgcctaagtattcactcttcgagctggaaaatggtcgtaaacgcatgctcgcttctgccggcgagttgcagaagggcaatgaattagcacttccatcaaagtacgttaacttcctgtatttggccagccattacgagaaactgaaggggtctccagaggacaacgaacagaaacaattatttgtagagcagcacaagcattatcttgatgaaatcattgagcaaatttccgaattcagtaaacgcgtaatcctggccgatgcaaacctcgacaaggtgctgagcgcttacaataagcatcgcgacaaacctatccgtgagcaggctgaaaatatcattcacctgttcacattaacgaacctgggcgctccggccgcttttaaatatttcgacacgacaatcgaccgtaagcgctataccagtacgaaagaagtgttggatgcgacccttattcaccagtcaattacaggattatatgagacccgtatcgaccttagccaattaggtggggatggaggcggagggtcggaagcggcagcaaaaggaggcggaggaagtatggtgagcaaaggtgaagaggataatatggccatcatcaaagaattcatgcgcttcaaagttcatatggaaggtagcgttaatggccacgaatttgaaattgaaggtgaaggcgaaggtcgtccgtatgaaggcacccagaccgcaaaactgaaagttaccaaaggtggtccgctgccgtttgcatgggatattctgagtccgcagtttatgtatggtagcaaagcctatgttaaacatccggcagatatcccggattatctgaaactgagctttccggaaggttttaaatgggaacgtgtgatgaattttgaagatggtggtgttgttaccgttacacaggatagcagcctgcaggatggtgaatttatctataaagttaaactgcgtggcacgaattttccgagtgatggtccggttatgcagaaaaaaaccatgggttgggaagcaagcagcgaacgtatgtatccggaagatggcgcactgaaaggtgaaattaaacagcgtctgaagctgaaagatggcggtcattatgatgcagaagttaaaaccacctacaaagccaaaaaaccggttcagctgcctggtgcatataacgttaacattaaactggatatcaccagccacaacgaggattataccattgttgaacagtatgaacgtgcagaaggtcgccatagtaccggtggtatggatgaactgtataaa

SEQ ID NO: 371 - DNA, 4878 bp, synthetic construct
  misc_feature 1..4878: note = SYNTHETIC
  source 1..4878: mol_type = other DNA
atggacaaaaagtactctattggcctggatatcgggaccaacagcgtcgggtgggctgttatcaccgacgagtataaagtaccttcgaaaaagttcaaagtgctgggcaacaccgatcgccattcaatcaaaaagaacttgattggtgcgctgttgtttgactccggggaaaccgccgaggcgactcgccttaaacgtacagcacgtcgccggtacactcggcgtaagaatcgcatttgctatttgcaggaaatctttagcaacgagatggcaaaagtcgatgactcgtttttccaccgcctcgaggaaagctttctggtggaggaagacaaaaagcatgagcgtcacccgatcttcggcaacattgtcgatgaagtagcgtatcatgaaaaatacccaaccatttaccacttacgcaaaaagctggtggacagcactgacaaagctgatttgcgccttatctatttagccctggcacatatgattaagtttcgtggtcacttcctgatcgaaggagacttaaatcccgacaacagtgatgttgataaattgtttattcagcttgtccaaacttacaatcaactgttcgaggaaaacccgatcaatgcctccggtgtggatgcaaaagccattttaagtgcacgccttagcaagtcccgtcgcttagaaaaccttatcgcgcagctgcccggcgagaaaaagaatggtttgtttgggaaccttattgccttgagcttaggcctcaccccgaatttcaaaagtaatttcgatcttgcagaagacgccaaattacaactgtcgaaggatacttatgatgacgatctcgataatctgttagcgcagattggtgaccaatacgccgatctttttctggcggctaaaaatctgagcgacgccatcttgctttcggatattctccgcgttaacaccgaaatcacgaaagcgcctcttagtgccagcatgattaaacgttatgatgaacaccaccaggacctgaccttactcaaagcgttggttcgccagcaactgccagagaagtacaaagaaatcttctttgatcagtcaaagaatggttatgccggctatattgacgggggtgcaagccaagaggaattctacaaatttatcaagcctattctggagaaaatggatggcaccgaagagttattggtgaagcttaaccgtgaagacctcctgcggaaacagcgcacattcgataatggttcgatcccacaccaaatccatttgggggagttacacgctattttgcgtcgccaggaagacttttaccctttcctgaaggataaccgggagaaaattgagaagatccttacctttcgtattccgtattacgtaggccccttagcacggggtaatagccgtttcgcgtggatgacacggaagtcggaagagacgatcaccccgtggaacttcgaagaggtagtcgacaagggcgcatcagcgcagtcttttattgaacgtatgacgaatttcgataaaaacttgcccaatgagaaggtgcttccgaaacattccttgttatatgaatattttacagtttacaacgagctgaccaaggttaaatacgtgacggaaggaatgcgcaagcccgcttttcttagcggtgagcaaaaaaaggcgatcgtcgacctgttattcaaaacgaatcgtaaggtgactgtaaagcaactcaaagaagattacttcaaaaagattgagtgcttcgacagcgtcgaaatctctggggtagaggatcggtttaacgcaagtttaggtacctaccatgacctgcttaaaatcattaaggataaagacttcttagataatgaagagaacgaagatattctcgaggacatcgtcttgacgttaaccttatttgaggatcgtgaaatgattgaggaacgcctcaaaacttatgcccacctgttcgacgataaggtgatgaagcagctgaaacgtcggcgctacacaggatggggccgcttgagtcgcaaacttattaacggaatccgtgacaagcaatccggcaaaacgattctggatttcttgaagtcggacggatttgctaatcgcaacttcatgcagttgatccatgatgactccctgacttttaaagaggatattcaaaaggcgcaggttagtggtcaaggcgacagcttacacgaacacatcgcaaatttggctggttcgccggccattaaaaaggggatcctccagaccgtgaaagttgtagatgagcttgttaaggtcatgggtcgtcataagcccgaaaacatcgtgattgaaatggcgcgggagaatcaaacgacccagaaaggacaaaagaatagccgtgaacggatgaagcggatcgaggaaggcattaaagagctggggtctcaaatcttgaaggaacaccctgtggagaacactcagctccaaaatgaaaaactttacctgtactatttgcagaacggacgcgatatgtacgtggaccaagagttggatattaatcggctgagtgactacgacgttgatcatatcgtcccgcagagcttcctcaaagacgattctattgacaataaggtactgacgcgctctgataaaaaccgtggtaagtcggacaacgtgccctccgaagaggttgtgaaaaagatgaaaaattattggcgccagcttttaaacgcgaagctgatcacacaacgtaaattcgataatttgaccaaggctgaacggggtggcctgagcgagttagataaggcaggatttattaaacgccagttagtggagactcgtcaaatcaccaaacatgtcgcgcagattttggacagccggatgaacaccaagtacgatgaaaatgacaaactgatccgtgaggtgaaagtcattactctgaagtccaaattagttagtgatttccggaaggactttcaattctacaaagtccgtgaaattaataactatcatcacgcacatgacgcgtacctgaatgcagtggttgggaccgcccttatcaagaaatatcctaagctggagtcggagtttgtctatggcgactataaggtatacgatgttcgcaaaatgattgcgaaatctgagcaggagatcggtaaggcaaccgcaaaatatttcttttactcaaacattatgaatttctttaagacagaaatcactctggccaacggggagattcgcaaacgtccgttgatcgaaacaaacggcgagactggcgaaattgtttgggacaaagggcgtgatttcgcgacggtgcgcaaggtactgagcatgcctcaagtcaatattgttaagaaaaccgaagtgcagacgggcgggttttccaaggaaagcatcttacccaaacgtaattcagataaacttattgcacgcaaaaaggactgggatccgaaaaagtatggaggcttcgacagtccaaccgtagcctactctgttctcgttgtagcgaaagtagaaaagggtaaatccaagaaactgaaatctgtcaaggagttgcttggaatcaccattatggagcgtagctccttcgagaagaacccgattgactttctggaagccaaaggatataaagaggtcaagaaagatcttatcattaagctgcctaagtattcactcttcgagctggaaaatggtcgtaaacgcatgctcgcttctgccggcgagttgcagaagggcaatgaattagcacttccatcaaagtacgttaacttcctgtatttggccagccattacgagaaactgaaggggtctccagaggacaacgaacagaaacaattatttgtagagcagcacaagcattatcttgatgaaatcattgagcaaatttccgaattcagtaaacgcgtaatcctggccgatgcaaacctcgacaaggtgctgagcgcttacaataagcatcgcgacaaacctatccgtgagcaggctgaaaatatcattcacctgttcacattaacgaacctgggcgctccggccgcttttaaatatttcgacacgacaatcgaccgtaagcgctataccagtacgaaagaagtgttggatgcgacccttattcaccagtcaattacaggattatatgagacccgtatcgaccttagccaattaggtggggatgctgaggccgcagcaaaagaggctgccgctaaggaggctgctgcaaaagaagcagcagcgaaagctatggtgagcaaaggtgaagaggataatatggccatcatcaaagaattcatgcgcttcaaagttcatatggaaggtagcgttaatggccacgaatttgaaattgaaggtgaaggcgaaggtcgtccgtatgaaggcacccagaccgcaaaactgaaagttaccaaaggtggtccgctgccgtttgcatgggatattctgagtccgcagtttatgtatggtagcaaagcctatgttaaacatccggcagatatcccggattatctgaaactgagctttccggaaggttttaaatgggaacgtgtgatgaattttgaagatggtggtgttgttaccgttacacaggatagcagcctgcaggatggtgaatttatctataaagttaaactgcgtggcacgaattttccgagtgatggtccggttatgcagaaaaaaaccatgggttgggaagcaagcagcgaacgtatgtatccggaagatggcgcactgaaaggtgaaattaaacagcgtctgaagctgaaagatggcggtcattatgatgcagaagttaaaaccacctacaaagccaaaaaaccggttcagctgcctggtgcatataacgttaacattaaactggatatcaccagccacaacgaggattataccattgttgaacagtatgaacgtgcagaaggtcgccatagtaccggtggtatggatgaactgtataaa

SEQ ID NO: 372 - DNA, 4950 bp, synthetic construct
  misc_feature 1..4950: note = SYNTHETIC
  source 1..4950: mol_type = other DNA
atggacaaaaagtactctattggcctggatatcgggaccaacagcgtcgggtgggctgttatcaccgacgagtataaagtaccttcgaaaaagttcaaagtgctgggcaacaccgatcgccattcaatcaaaaagaacttgattggtgcgctgttgtttgactccggggaaaccgccgaggcgactcgccttaaacgtacagcacgtcgccggtacactcggcgtaagaatcgcatttgctatttgcaggaaatctttagcaacgagatggcaaaagtcgatgactcgtttttccaccgcctcgaggaaagctttctggtggaggaagacaaaaagcatgagcgtcacccgatcttcggcaacattgtcgatgaagtagcgtatcatgaaaaatacccaaccatttaccacttacgcaaaaagctggtggacagcactgacaaagctgatttgcgccttatctatttagccctggcacatatgattaagtttcgtggtcacttcctgatcgaaggagacttaaatcccgacaacagtgatgttgataaattgtttattcagcttgtccaaacttacaatcaactgttcgaggaaaacccgatcaatgcctccggtgtggatgcaaaagccattttaagtgcacgccttagcaagtcccgtcgcttagaaaaccttatcgcgcagctgcccggcgagaaaaagaatggtttgtttgggaaccttattgccttgagcttaggcctcaccccgaatttcaaaagtaatttcgatcttgcagaagacgccaaattacaactgtcgaaggatacttatgatgacgatctcgataatctgttagcgcagattggtgaccaatacgccgatctttttctggcggctaaaaatctgagcgacgccatcttgctttcggatattctccgcgttaacaccgaaatcacgaaagcgcctcttagtgccagcatgattaaacgttatgatgaacaccaccaggacctgaccttactcaaagcgttggttcgccagcaactgccagagaagtacaaagaaatcttctttgatcagtcaaagaatggttatgccggctatattgacgggggtgcaagccaagaggaattctacaaatttatcaagcctattctggagaaaatggatggcaccgaagagttattggtgaagcttaaccgtgaagacctcctgcggaaacagcgcacattcgataatggttcgatcccacaccaaatccatttgggggagttacacgctattttgcgtcgccaggaagacttttaccctttcctgaaggataaccgggagaaaattgagaagatccttacctttcgtattccgtattacgtaggccccttagcacggggtaatagccgtttcgcgtggatgacacggaagtcggaagagacgatcaccccgtggaacttcgaagaggtagtcgacaagggcgcatcagcgcagtcttttattgaacgtatgacgaatttcgataaaaacttgcccaatgagaaggtgcttccgaaacattccttgttatatgaatattttacagtttacaacgagctgaccaaggttaaatacgtgacggaaggaatgcgcaagcccgcttttcttagcggtgagcaaaaaaaggcgatcgtcgacctgttattcaaaacgaatcgtaaggtgactgtaaagcaactcaaagaagattacttcaaaaagattgagtgcttcgacagcgtcgaaatctctggggtagaggatcggtttaacgcaagtttaggtacctaccatgacctgcttaaaatcattaaggataaagacttcttagataatgaagagaacgaagatattctcgaggacatcgtcttgacgttaaccttatttgaggatcgtgaaatgattgaggaacgcctcaaaacttatgcccacctgttcgacgataaggtgatgaagcagctgaaacgtcggcgctacacaggatggggccgcttgagtcgcaaacttattaacggaatccgtgacaagcaatccggcaaaacgattctggatttcttgaagtcggacggatttgctaatcgcaacttcatgcagttgatccatgatgactccctgacttttaaagaggatattcaaaaggcgcaggttagtggtcaaggcgacagcttacacgaacacatcgcaaatttggctggttcgccggccattaaaaaggggatcctccagaccgtgaaagttgtagatgagcttgttaaggtcatgggtcgtcataagcccgaaaacatcgtgattgaaatggcgcgggagaatcaaacgacccagaaaggacaaaagaatagccgtgaacggatgaagcggatcgaggaaggcattaaagagctggggtctcaaatcttgaaggaacaccctgtggagaacactcagctccaaaatgaaaaactttacctgtactatttgcagaacggacgcgatatgtacgtggaccaagagttggatattaatcggctgagtgactacgacgttgatcatatcgtcccgcagagcttcctcaaagacgattctattgacaataaggtactgacgcgctctgataaaaaccgtggtaagtcggacaacgtgccctccgaagaggttgtgaaaaagatgaaaaattattggcgccagcttttaaacgcgaagctgatcacacaacgtaaattcgataatttgaccaaggctgaacggggtggcctgagcgagttagataaggcaggatttattaaacgccagttagtggagactcgtcaaatcaccaaacatgtcgcgcagattttggacagccggatgaacaccaagtacgatgaaaatgacaaactgatccgtgaggtgaaagtcattactctgaagtccaaattagttagtgatttccggaaggactttcaattctacaaagtccgtgaaattaataactatcatcacgcacatgacgcgtacctgaatgcagtggttgggaccgcccttatcaagaaatatcctaagctggagtcggagtttgtctatggcgactataaggtatacgatgttcgcaaaatgattgcgaaatctgagcaggagatcggtaaggcaaccgcaaaatatttcttttactcaaacattatgaatttctttaagacagaaatcactctggccaacggggagattcgcaaacgtccgttgatcgaaacaaacggcgagactggcgaaattgtttgggacaaagggcgtgatttcgcgacggtgcgcaaggtactgagcatgcctcaagtcaatattgttaagaaaaccgaagtgcagacgggcgggttttccaaggaaagcatcttacccaaacgtaattcagataaacttattgcacgcaaaaaggactgggatccgaaaaagtatggaggcttcgacagtccaaccgtagcctactctgttctcgttgtagcgaaagtagaaaagggtaaatccaagaaactgaaatctgtcaaggagttgcttggaatcaccattatggagcgtagctccttcgagaagaacccgattgactttctggaagccaaaggatataaagaggtcaagaaagatcttatcattaagctgcctaagtattcactcttcgagctggaaaatggtcgtaaacgcatgctcgcttctgccggcgagttgcagaagggcaatgaattagcacttccatcaaagtacgttaacttcctgtatttggccagccattacgagaaactgaaggggtctccagaggacaacgaacagaaacaattatttgtagagcagcacaagcattatcttgatgaaatcattgagcaaatttccgaattcagtaaacgcgtaatcctggccgatgcaaacctcgacaaggtgctgagcgcttacaataagcatcgcgacaaacctatccgtgagcaggctgaaaatatcattcacctgttcacattaacgaacctgggcgctccggccgcttttaaatatttcgacacgacaatcgaccgtaagcgctataccagtacgaaagaagtgttggatgcgacccttattcaccagtcaattacaggattatatgagacccgtatcgaccttagccaattaggtggggatgccgaagcagcagccaaagaagctgccgcaaaggaggcggcagctaaagaagcggccgctaaggcattggaagcggaggcggctgccaaggaggctgcggcgaaagaagctgcggccaaagaagcggctgcaaaagcgatggtgagcaaaggtgaagaggataatatggccatcatcaaagaattcatgcgcttcaaagttcatatggaaggtagcgttaatggccacgaatttgaaattgaaggtgaaggcgaaggtcgtccgtatgaaggcacccagaccgcaaaactgaaagttaccaaaggtggtccgctgccgtttgcatgggatattctgagtccgcagtttatgtatggtagcaaagcctatgttaaacatccggcagatatcccggattatctgaaactgagctttccggaaggttttaaatgggaacgtgtgatgaattttgaagatggtggtgttgttaccgttacacaggatagcagcctgcaggatggtgaatttatctataaagttaaactgcgtggcacgaattttccgagtgatggtccggttatgcagaaaaaaaccatgggttgggaagcaagcagcgaacgtatgtatccggaagatggcgcactgaaaggtgaaattaaacagcgtctgaagctgaaagatggcggtcattatgatgcagaagttaaaaccacctacaaagccaaaaaaccggttcagctgcctggtgcatataacgttaacattaaactggatatcaccagccacaacgaggattataccattgttgaacagtatgaacgtgcagaaggtcgccatagtaccggtggtatggatgaactgtataaa

SEQ ID NO: 373 - DNA, 4962 bp, synthetic construct
  misc_feature 1..4962: note = SYNTHETIC
  source 1..4962: mol_type = other DNA
atggacaaaaagtactctattggcctggatatcgggaccaacagcgtcgggtgggctgttatcaccgacgagtataaagtaccttcgaaaaagttcaaagtgctgggcaacaccgatcgccattcaatcaaaaagaacttgattggtgcgctgttgtttgactccggggaaaccgccgaggcgactcgccttaaacgtacagcacgtcgccggtacactcggcgtaagaatcgcatttgctatttgcaggaaatctttagcaacgagatggcaaaagtcgatgactcgtttttccaccgcctcgaggaaagctttctggtggaggaagacaaaaagcatgagcgtcacccgatcttcggcaacattgtcgatgaagtagcgtatcatgaaaaatacccaaccatttaccacttacgcaaaaagctggtggacagcactgacaaagctgatttgcgccttatctatttagccctggcacatatgattaagtttcgtggtcacttcctgatcgaaggagacttaaatcccgacaacagtgatgttgataaattgtttattcagcttgtccaaacttacaatcaactgttcgaggaaaacccgatcaatgcctccggtgtggatgcaaaagccattttaagtgcacgccttagcaagtcccgtcgcttagaaaaccttatcgcgcagctgcccggcgagaaaaagaatggtttgtttgggaaccttattgccttgagcttaggcctcaccccgaatttcaaaagtaatttcgatcttgcagaagacgccaaattacaactgtcgaaggatacttatgatgacgatctcgataatctgttagcgcagattggtgaccaatacgccgatctttttctggcggctaaaaatctgagcgacgccatcttgctttcggatattctccgcgttaacaccgaaatcacgaaagcgcctcttagtgccagcatgattaaacgttatgatgaacaccaccaggacctgaccttactcaaagcgttggttcgccagcaactgccagagaagtacaaagaaatcttctttgatcagtcaaagaatggttatgccggctatattgacgggggtgcaagccaagaggaattctacaaatttatcaagcctattctggagaaaatggatggcaccgaagagttattggtgaagcttaaccgtgaagacctcctgcggaaacagcgcacattcgataatggttcgatcccacaccaaatccatttgggggagttacacgctattttgcgtcgccaggaagacttttaccctttcctgaaggataaccgggagaaaattgagaagatccttacctttcgtattccgtattacgtaggccccttagcacggggtaatagccgtttcgcgtggatgacacggaagtcggaagagacgatcaccccgtggaacttcgaagaggtagtcgacaagggcgcatcagcgcagtcttttattgaacgtatgacgaatttcgataaaaacttgcccaatgagaaggtgcttccgaaacattccttgttatatgaatattttacagtttacaacgagctgaccaaggttaaatacgtgacggaaggaatgcgcaagcccgcttttcttagcggtgagcaaaaaaaggcgatcgtcgacctgttattcaaaacgaatcgtaaggtgactgtaaagcaactcaaagaagattacttcaaaaagattgagtgcttcgacagcgtcgaaatctctggggtagaggatcggtttaacgcaagtttaggtacctaccatgacctgcttaaaatcattaaggataaagacttcttagataatgaagagaacgaagatattctcgaggacatcgtcttgacgttaaccttatttgaggatcgtgaaatgattgaggaacgcctcaaaacttatgcccacctgttcgacgataaggtgatgaagcagctgaaacgtcggcgctacacaggatggggccgcttgagtcgcaaacttattaacggaatccgtgacaagcaatccggcaaaacgattctggatttcttgaagtcggacggatttgctaatcgcaacttcatgcagttgatccatgatgactccctgacttttaaagaggatattcaaaaggcgcaggttagtggtcaaggcgacagcttacacgaacacatcgcaaatttggctggttcgccggccattaaaaaggggatcctccagaccgtgaaagttgtagatgagcttgttaaggtcatgggtcgtcataagcccgaaaacatcgtgattgaaatggcgcgggagaatcaaacgacccagaaaggacaaaagaatagccgtgaacggatgaagcggatcgaggaaggcattaaagagctggggtctcaaatcttgaaggaacaccctgtggagaacactcagctccaaaatgaaaaactttacctgtactatttgcagaacggacgcgatatgtacgtggaccaagagttggatattaatcggctgagtgactacgacgttgatcatatcgtcccgcagagcttcctcaaagacgattctattgacaataaggtactgacgcgctctgataaaaaccgtggtaagtcggacaacgtgccctccgaagaggttgtgaaaaagatgaaaaattattggcgccagcttttaaacgcgaagctgatcacacaacgtaaattcgataatttgaccaaggctgaacggggtggcctgagcgagttagataaggcaggatttattaaacgccagttagtggagactcgtcaaatcaccaaacatgtcgcgcagattttggacagccggatgaacaccaagtacgatgaaaatgacaaactgatccgtgaggtgaaagtcattactctgaagtccaaattagttagtgatttccggaaggactttcaattctacaaagtccgtgaaattaataactatcatcacgcacatgacgcgtacctgaatgcagtggttgggaccgcccttatcaagaaatatcctaagctggagtcggagtttgtctatggcgactataaggtatacgatgttcgcaaaatgattgcgaaatctgagcaggagatcggtaaggcaaccgcaaaatatttcttttactcaaacattatgaatttctttaagacagaaatcactctggccaacggggagattcgcaaacgtccgttgatcgaaacaaacggcgagactggcgaaattgtttgggacaaagggcgtgatttcgcgacggtgcgcaaggtactgagcatgcctcaagtcaatattgttaagaaaaccgaagtgcagacgggcgggttttccaaggaaagcatcttacccaaacgtaattcagataaacttattgcacgcaaaaaggactgggatccgaaaaagtatggaggcttcgacagtccaaccgtagcctactctgttctcgttgtagcgaaagtagaaaagggtaaatccaagaaactgaaatctgtcaaggagttgcttggaatcaccattatggagcgtagctccttcgagaagaacccgattgactttctggaagccaaaggatataaagaggtcaagaaagatcttatcattaagctgcctaagtattcactcttcgagctggaaaatggtcgtaaacgcatgctcgcttctgccggcgagttgcagaagggcaatgaattagcacttccatcaaagtacgttaacttcctgtatttggccagccattacgagaaactgaaggggtctccagaggacaacgaacagaaacaattatttgtagagcagcacaagcattatcttgatgaaatcattgagcaaatttccgaattcagtaaacgcgtaatcctggccgatgcaaacctcgacaaggtgctgagcgcttacaataagcatcgcgacaaacctatccgtgagcaggctgaaaatatcattcacctgttcacattaacgaacctgggcgctccggccgcttttaaatatttcgacacgacaatcgaccgtaagcgctataccagtacgaaagaagtgttggatgcgacccttattcaccagtcaattacaggattatatgagacccgtatcgaccttagccaattaggtggggatttagaggctgaggctgctgccaaggaggctgctgcgaaggaagctgcagctaaagaggcagcggccaaagcacttgaggccgaagccgccgcgaaagaagccgctgctaaggaggcagccgccaaagaagcggcagctaaagcattagaaatggtgagcaaaggtgaagaggataatatggccatcatcaaagaattcatgcgcttcaaagttcatatggaaggtagcgttaatggccacgaatttgaaattgaaggtgaaggcgaaggtcgtccgtatgaaggcacccagaccgcaaaactgaaagttaccaaaggtggtccgctgccgtttgcatgggatattctgagtccgcagtttatgtatggtagcaaagcctatgttaaacatccggcagatatcccggattatctgaaactgagctttccggaaggttttaaatgggaacgtgtgatgaattttgaagatggtggtgttgttaccgttacacaggatagcagcctgcaggatggtgaatttatctataaagttaaactgcgtggcacgaattttccgagtgatggtccggttatgcagaaaaaaaccatgggttgggaagcaagcagcgaacgtatgtatccggaagatggcgcactgaaaggtgaaattaaacagcgtctgaagctgaaagatggcggtcattatgatgcagaagttaaaaccacctacaaagccaaaaaaccggttcagctgcctggtgcatataacgttaacattaaactggatatcaccagccacaacgaggattataccattgttgaacagtatgaacgtgcagaaggtcgccatagtaccggtggtatggatgaactgtataaa

SEQ ID NO: 374 - DNA, 4821 bp, synthetic construct
  misc_feature 1..4821: note = SYNTHETIC
  source 1..4821: mol_type = other DNA
atggacaaaaagtactctattggcctggatatcgggaccaacagcgtcgggtgggctgttatcaccgacgagtataaagtaccttcgaaaaagttcaaagtgctgggcaacaccgatcgccattcaatcaaaaagaacttgattggtgcgctgttgtttgactccggggaaaccgccgaggcgactcgccttaaacgtacagcacgtcgccggtacactcggcgtaagaatcgcatttgctatttgcaggaaatctttagcaacgagatggcaaaagtcgatgactcgtttttccaccgcctcgaggaaagctttctggtggaggaagacaaaaagcatgagcgtcacccgatcttcggcaacattgtcgatgaagtagcgtatcatgaaaaatacccaaccatttaccacttacgcaaaaagctggtggacagcactgacaaagctgatttgcgccttatctatttagccctggcacatatgattaagtttcgtggtcacttcctgatcgaaggagacttaaatcccgacaacagtgatgttgataaattgtttattcagcttgtccaaacttacaatcaactgttcgaggaaaacccgatcaatgcctccggtgtggatgcaaaagccattttaagtgcacgccttagcaagtcccgtcgcttagaaaaccttatcgcgcagctgcccggcgagaaaaagaatggtttgtttgggaaccttattgccttgagcttaggcctcaccccgaatttcaaaagtaatttcgatcttgcagaagacgccaaattacaactgtcgaaggatacttatgatgacgatctcgataatctgttagcgcagattggtgaccaatacgccgatctttttctggcggctaaaaatctgagcgacgccatcttgctttcggatattctccgcgttaacaccgaaatcacgaaagcgcctcttagtgccagcatgattaaacgttatgatgaacaccaccaggacctgaccttactcaaagcgttggttcgccagcaactgccagagaagtacaaagaaatcttctttgatcagtcaaagaatggttatgccggctatattgacgggggtgcaagccaagaggaattctacaaatttatcaagcctattctggagaaaatggatggcaccgaagagttattggtgaagcttaaccgtgaagacctcctgcggaaacagcgcacattcgataatggttcgatcccacaccaaatccatttgggggagttacacgctattttgcgtcgccaggaagacttttaccctttcctgaaggataaccgggagaaaattgagaagatccttacctttcgtattccgtattacgtaggccccttagcacggggtaatagccgtttcgcgtggatgacacggaagtcggaagagacgatcaccccgtggaacttcgaagaggtagtcgacaagggcgcatcagcgcagtcttttattgaacgtatgacgaatttcgataaaaacttgcccaatgagaaggtgcttccgaaacattccttgttatatgaatattttacagtttacaacgagctgaccaaggttaaatacgtgacggaaggaatgcgcaagcccgcttttcttagcggtgagcaaaaaaaggcgatcgtcgacctgttattcaaaacgaatcgtaaggtgactgtaaagcaactcaaagaagattacttcaaaaagattgagtgcttcgacagcgtcgaaatctctggggtagaggatcggtttaacgcaagtttaggtacctaccatgacctgcttaaaatcattaaggataaagacttcttagataatgaagagaacgaagatattctcgaggacatcgtcttgacgttaaccttatttgaggatcgtgaaatgattgaggaacgcctcaaaacttatgcccacctgttcgacgataaggtgatgaagcagctgaaacgtcggcgctacacaggatggggccgcttgagtcgcaaacttattaacggaatccgtgacaagcaatccggcaaaacgattctggatttcttgaagtcggacggatttgctaatcgcaacttcatgcagttgatccatgatgactccctgacttttaaagaggatattcaaaaggcgcaggttagtggtcaaggcgacagcttacacgaacacatcgcaaatttggctggttcgccggccattaaaaaggggatcctccagaccgtgaaagttgtagatgagcttgttaaggtcatgggtcgtcataagcccgaaaacatcgtgattgaaatggcgcgggagaatcaaacgacccagaaaggacaaaagaatagccgtgaacggatgaagcggatcgaggaaggcattaaagagctggggtctcaaatcttgaaggaacaccctgtggagaacactcagctccaaaatgaaaaactttacctgtactatttgcagaacggacgcgatatgtacgtggaccaagagttggatattaatcggctgagtgactacgacgttgatcatatcgtcccgcagagcttcctcaaagacgattctattgacaataaggtactgacgcgctctgataaaaaccgtggtaagtcggacaacgtgccctccgaagaggttgtgaaaaagatgaaaaattattggcgccagcttttaaacgcgaagctgatcacacaacgtaaattcgataatttgaccaaggctgaacggggtggcctgagcgagttagataaggcaggatttattaaacgccagttagtggagactcgtcaaatcaccaaacatgtcgcgcagattttggacagccggatgaacaccaagtacgatgaaaatgacaaactgatccgtgaggtgaaagtcattactctgaagtccaaattagttagtgatttccggaaggactttcaattctacaaagtccgtgaaattaataactatcatcacgcacatgacgcgtacctgaatgcagtggttgggaccgcccttatcaagaaatatcctaagctggagtcggagtttgtctatggcgactataaggtatacgatgttcgcaaaatgattgcgaaatctgagcaggagatcggtaaggcaaccgcaaaatatttcttttactcaaacattatgaatttctttaagacagaaatcactctggccaacggggagattcgcaaacgtccgttgatcgaaacaaacggcgagactggcgaaattgtttgggacaaagggcgtgatttcgcgacggtgcgcaaggtactgagcatgcctcaagtcaatattgttaagaaaaccgaagtgcagacgggcgggttttccaaggaaagcatcttacccaaacgtaattcagataaacttattgcacgcaaaaaggactgggatccgaaaaagtatggaggcttcgacagtccaaccgtagcctactctgttctcgttgtagcgaaagtagaaaagggtaaatccaagaaactgaaatctgtcaaggagttgcttggaatcaccattatggagcgtagctccttcgagaagaacccgattgactttctggaagccaaaggatataaagaggtcaagaaagatcttatcattaagctgcctaagtattcactcttcgagctggaaaatggtcgtaaacgcatgctcgcttctgccggcgagttgcagaagggcaatgaattagcacttccatcaaagtacgttaacttcctgtatttggccagccattacgagaaactgaaggggtctccagaggacaacgaacagaaacaattatttgtagagcagcacaagcattatcttgatgaaatcattgagcaaatttccgaattcagtaaacgcgtaatcctggccgatgcaaacctcgacaaggtgctgagcgcttacaataagcatcgcgacaaacctatccgtgagcaggctgaaaatatcattcacctgttcacattaacgaacctgggcgctccggccgcttttaaatatttcgacacgacaatcgaccgtaagcgctataccagtacgaaagaagtgttggatgcgacccttattcaccagtcaattacaggattatatgagacccgtatcgaccttagccaattaggtggggatgcacctgcgatggtgagcaaaggtgaagaggataatatggccatcatcaaagaattcatgcgcttcaaagttcatatggaaggtagcgttaatggccacgaatttgaaattgaaggtgaaggcgaaggtcgtccgtatgaaggcacccagaccgcaaaactgaaagttaccaaaggtggtccgctgccgtttgcatgggatattctgagtccgcagtttatgtatggtagcaaagcctatgttaaacatccggcagatatcccggattatctgaaactgagctttccggaaggttttaaatgggaacgtgtgatgaattttgaagatggtggtgttgttaccgttacacaggatagcagcctgcaggatggtgaatttatctataaagttaaactgcgtggcacgaattttccgagtgatggtccggttatgcagaaaaaaaccatgggttgggaagcaagcagcgaacgtatgtatccggaagatggcgcactgaaaggtgaaattaaacagcgtctgaagctgaaagatggcggtcattatgatgcagaagttaaaaccacctacaaagccaaaaaaccggttcagctgcctggtgcatataacgttaacattaaactggatatcaccagccacaacgaggattataccattgttgaacagtatgaacgtgcagaaggtcgccatagtaccggtggtatggatgaactgtataaa

SEQ ID NO: 375 - DNA, 4827 bp, synthetic construct
  misc_feature 1..4827: note = SYNTHETIC
  source 1..4827: mol_type = other DNA
atggacaaaaagtactctattggcctggatatcgggaccaacagcgtcgggtgggctgttatcaccgacgagtataaagtaccttcgaaaaagttcaaagtgctgggcaacaccgatcgccattcaatcaaaaagaacttgattggtgcgctgttgtttgactccggggaaaccgccgaggcgactcgccttaaacgtacagcacgtcgccggtacactcggcgtaagaatcgcatttgctatttgcaggaaatctttagcaacgagatggcaaaagtcgatgactcgtttttccaccgcctcgaggaaagctttctggtggaggaagacaaaaagcatgagcgtcacccgatcttcggcaacattgtcgatgaagtagcgtatcatgaaaaatacccaaccatttaccacttacgcaaaaagctggtggacagcactgacaaagctgatttgcgccttatctatttagccctggcacatatgattaagtttcgtggtcacttcctgatcgaaggagacttaaatcccgacaacagtgatgttgataaattgtttattcagcttgtccaaacttacaatcaactgttcgaggaaaacccgatcaatgcctccggtgtggatgcaaaagccattttaagtgcacgccttagcaagtcccgtcgcttagaaaaccttatcgcgcagctgcccggcgagaaaaagaatggtttgtttgggaaccttattgccttgagcttaggcctcaccccgaatttcaaaagtaatttcgatcttgcagaagacgccaaattacaactgtcgaaggatacttatgatgacgatctcgataatctgttagcgcagattggtgaccaatacgccgatctttttctggcggctaaaaatctgagcgacgccatcttgctttcggatattctccgcgttaacaccgaaatcacgaaagcgcctcttagtgccagcatgattaaacgttatgatgaacaccaccaggacctgaccttactcaaagcgttggttcgccagcaactgccagagaagtacaaagaaatcttctttgatcagtcaaagaatggttatgccggctatattgacgggggtgcaagccaagaggaattctacaaatttatcaagcctattctggagaaaatggatggcaccgaagagttattggtgaagcttaaccgtgaagacctcctgcggaaacagcgcacattcgataatggttcgatcccacaccaaatccatttgggggagttacacgctattttgcgtcgccaggaagacttttaccctttcctgaaggataaccgggagaaaattgagaagatccttacctttcgtattccgtattacgtaggccccttagcacggggtaatagccgtttcgcgtggatgacacggaagtcggaagagacgatcaccccgtggaacttcgaagaggtagtcgacaagggcgcatcagcgcagtcttttattgaacgtatgacgaatttcgataaaaacttgcccaatgagaaggtgcttccgaaacattccttgttatatgaatattttacagtttacaacgagctgaccaaggttaaatacgtgacggaaggaatgcgcaagcccgcttttcttagcggtgagcaaaaaaaggcgatcgtcgacctgttattcaaaacgaatcgtaaggtgactgtaaagcaactcaaagaagattacttcaaaaagattgagtgcttcgacagcgtcgaaatctctggggtagaggatcggtttaacgcaagtttaggtacctaccatgacctgcttaaaatcattaaggataaagacttcttagataatgaagagaacgaagatattctcgaggacatcgtcttgacgttaaccttatttgaggatcgtgaaatgattgaggaacgcctcaaaacttatgcccacctgttcgacgataaggtgatgaagcagctgaaacgtcggcgctacacaggatggggccgcttgagtcgcaaacttattaacggaatccgtgacaagcaatccggcaaaacgattctggatttcttgaagtcggacggatttgctaatcgcaacttcatgcagttgatccatgatgactccctgacttttaaagaggatattcaaaaggcgcaggttagtggtcaaggcgacagcttacacgaacacatcgcaaatttggctggttcgccggccattaaaaaggggatcctccagaccgtgaaagttgtagatgagcttgttaaggtcatgggtcgtcataagcccgaaaacatcgtgattgaaatggcgcgggagaatcaaacgacccagaaaggacaaaagaatagccgtgaacggatgaagcggatcgaggaaggcattaaagagctggggtctcaaatcttgaaggaacaccctgtggagaacactcagctccaaaatgaaaaactttacctgtactatttgcagaacggacgcgatatgtacgtggaccaagagttggatattaatcggctgagtgactacgacgttgatcatatcgtcccgcagagcttcctcaaagacgattctattgacaataaggtactgacgcgctctgataaaaaccgtggtaagtcggacaacgtgccctccgaagaggttgtgaaaaagatgaaaaattattggcgccagcttttaaacgcgaagctgatcacacaacgtaaattcgataatttgaccaaggctgaacggggtggcctgagcgagttagataaggcaggatttattaaacgccagttagtggagactcgtcaaatcaccaaacatgtcgcgcagattttggacagccggatgaacaccaagtacgatgaaaatgacaaactgatccgtgaggtgaaagtcattactctgaagtccaaattagttagtgatttccggaaggactttcaattctacaaagtccgtgaaattaataactatcatcacgcacatgacgcgtacctgaatgcagtggttgggaccgcccttatcaagaaatatcctaagctggagtcggagtttgtctatggcgactataaggtatacgatgttcgcaaaatgattgcgaaatctgagcaggagatcggtaaggcaaccgcaaaatatttcttttactcaaacattatgaatttctttaagacagaaatcactctggccaacggggagattcgcaaacgtccgttgatcgaaacaaacggcgagactggcgaaattgtttgggacaaagggcgtgatttcgcgacggtgcgcaaggtactgagcatgcctcaagtcaatattgttaagaaaaccgaagtgcagacgggcgggttttccaaggaaagcatcttacccaaacgtaattcagataaacttattgcacgcaaaaaggactgggatccgaaaaagtatggaggcttcgacagtccaaccgtagcctactctgttctcgttgtagcgaaagtagaaaagggtaaatccaagaaactgaaatctgtcaaggagttgcttggaatcaccattatggagcgtagctccttcgagaagaacccgattgactttctggaagccaaaggatataaagaggtcaagaaagatcttatcattaagctgcctaagtattcactcttcgagctggaaaatggtcgtaaacgcatgctcgcttctgccggcgagttgcagaagggcaatgaattagcacttccatcaaagtacgttaacttcctgtatttggccagccattacgagaaactgaaggggtctccagaggacaacgaacagaaacaattatttgtagagcagcacaagcattatcttgatgaaatcattgagcaaatttccgaattcagtaaacgcgtaatcctggccgatgcaaacctcgacaaggtgctgagcgcttacaataagcatcgcgacaaacctatccgtgagcaggctgaaaatatcattcacctgttcacattaacgaacctgggcgctccggccgcttttaaatatttcgacacgacaatcgaccgtaagcgctataccagtacgaaagaagtgttggatgcgacccttattcaccagtcaattacaggattatatgagacccgtatcgaccttagccaattaggtggggatgctcctgcacctgcgatggtgagcaaaggtgaagaggataatatggccatcatcaaagaattcatgcgcttcaaagttcatatggaaggtagcgttaatggccacgaatttgaaattgaaggtgaaggcgaaggtcgtccgtatgaaggcacccagaccgcaaaactgaaagttaccaaaggtggtccgctgccgtttgcatgggatattctgagtccgcagtttatgtatggtagcaaagcctatgttaaacatccggcagatatcccggattatctgaaactgagctttccggaaggttttaaatgggaacgtgtgatgaattttgaagatggtggtgttgttaccgttacacaggatagcagcctgcaggatggtgaatttatctataaagttaaactgcgtggcacgaattttccgagtgatggtccggttatgcagaaaaaaaccatgggttgggaagcaagcagcgaacgtatgtatccggaagatggcgcactgaaaggtgaaattaaacagcgtctgaagctgaaagatggcggtcattatgatgcagaagttaaaaccacctacaaagccaaaaaaccggttcagctgcctggtgcatataacgttaacattaaactggatatcaccagccacaacgaggattataccattgttgaacagtatgaacgtgcagaaggtcgccatagtaccggtggtatggatgaactgtataaa

SEQ ID NO: 376 - DNA, 4833 bp, synthetic construct
  misc_feature 1..4833: note = SYNTHETIC
  source 1..4833: mol_type = other DNA
atggacaaaaagtactctattggcctggatatcgggaccaacagcgtcgggtgggctgttatcaccgacgagtataaagtaccttcgaaaaagttcaaagtgctgggcaacaccgatcgccattcaatcaaaaagaacttgattggtgcgctgttgtttgactccggggaaaccgccgaggcgactcgccttaaacgtacagcacgtcgccggtacactcggcgtaagaatcgcatttgctatttgcaggaaatctttagcaacgagatggcaaaagtcgatgactcgtttttccaccgcctcgaggaaagctttctggtggaggaagacaaaaagcatgagcgtcacccgatcttcggcaacattgtcgatgaagtagcgtatcatgaaaaatacccaaccatttaccacttacgcaaaaagctggtggacagcactgacaaagctgatttgcgccttatctatttagccctggcacatatgattaagtttcgtggtcacttcctgatcgaaggagacttaaatcccgacaacagtgatgttgataaattgtttattcagcttgtccaaacttacaatcaactgttcgaggaaaacccgatcaatgcctccggtgtggatgcaaaagccattttaagtgcacgccttagcaagtcccgtcgcttagaaaaccttatcgcgcagctgcccggcgagaaaaagaatggtttgtttgggaaccttattgccttgagcttaggcctcaccccgaatttcaaaagtaatttcgatcttgcagaagacgccaaattacaactgtcgaaggatacttatgatgacgatctcgataatctgttagcgcagattggtgaccaatacgccgatctttttctggcggctaaaaatctgagcgacgccatcttgctttcggatattctccgcgttaacaccgaaatcacgaaagcgcctcttagtgccagcatgattaaacgttatgatgaacaccaccaggacctgaccttactcaaagcgttggttcgccagcaactgccagagaagtacaaagaaatcttctttgatcagtcaaagaatggttatgccggctatattgacgggggtgcaagccaagaggaattctacaaatttatcaagcctattctggagaaaatggatggcaccgaagagttattggtgaagcttaaccgtgaagacctcctgcggaaacagcgcacattcgataatggttcgatcccacaccaaatccatttgggggagttacacgctattttgcgtcgccaggaagacttttaccctttcctgaaggataaccgggagaaaattgagaagatccttacctttcgtattccgtattacgtaggccccttagcacggggtaatagccgtttcgcgtggatgacacggaagtcggaagagacgatcaccccgtggaacttcgaagaggtagtcgacaagggcgcatcagcgcagtcttttattgaacgtatgacgaatttcgataaaaacttgcccaatgagaaggtgcttccgaaacattccttgttatatgaatattttacagtttacaacgagctgaccaaggttaaatacgtgacggaaggaatgcgcaagcccgcttttcttagcggtgagcaaaaaaaggcgatcgtcgacctgttattcaaaacgaatcgtaaggtgactgtaaagcaactcaaagaagattacttcaaaaagattgagtgcttcgacagcgtcgaaatctctggggtagaggatcggtttaacgcaagtttaggtacctaccatgacctgcttaaaatcattaaggataaagacttcttagataatgaagagaacgaagatattctcgaggacatcgtcttgacgttaaccttatttgaggatcgtgaaatgattgaggaacgcctcaaaacttatgcccacctgttcgacgataaggtgatgaagcagctgaaacgtcggcgctacacaggatggggccgcttgagtcgcaaacttattaacggaatccgtgacaagcaatccggcaaaacgattctggatttcttgaagtcggacggatttgctaatcgcaacttcatgcagttgatccatgatgactccctgacttttaaagaggatattcaaaaggcgcaggttagtggtcaaggcgacagcttacacgaacacatcgcaaatttggctggttcgccggccattaaaaaggggatcctccagaccgtgaaagttgtagatgagcttgttaaggtcatgggtcgtcataagcccgaaaacatcgtgattgaaatggcgcgggagaatcaaacgacccagaaaggacaaaagaatagccgtgaacggatgaagcggatcgaggaaggcattaaagagctggggtctcaaatcttgaaggaacaccctgtggagaacactcagctccaaaatgaaaaactttacctgtactatttgcagaacggacgcgatatgtacgtggaccaagagttggatattaatcggctgagtgactacgacgttgatcatatcgtcccgcagagcttcctcaaagacgattctattgacaataaggtactgacgcgctctgataaaaaccgtggtaagtcggacaacgtgccctccgaagaggttgtgaaaaagatgaaaaattattggcgccagcttttaaacgcgaagctgatcacacaacgtaaattcgataatttgaccaaggctgaacggggtggcctgagcgagttagataaggcaggatttattaaacgccagttagtggagactcgtcaaatcaccaaacatgtcgcgcagattttggacagccggatgaacaccaagtacgatgaaaatgacaaactgatccgtgaggtgaaagtcattactctgaagtccaaattagttagtgatttccggaaggactttcaattctacaaagtccgtgaaattaataactatcatcacgcacatgacgcgtacctgaatgcagtggttgggaccgcccttatcaagaaatatcctaagctggagtcggagtttgtctatggcgactataaggtatacgatgttcgcaaaatgattgcgaaatctgagcaggagatcggtaaggcaaccgcaaaatatttcttttactcaaacattatgaatttctttaagacagaaatcactctggccaacggggagattcgcaaacgtccgttgatcgaaacaaacggcgagactggcgaaattgtttgggacaaagggcgtgatttcgcgacggtgcgcaaggtactgagcatgcctcaagtcaatattgttaagaaaaccgaagtgcagacgggcgggttttccaaggaaagcatcttacccaaacgtaattcagataaacttattgcacgcaaaaaggactgggatccgaaaaagtatggaggcttcgacagtccaaccgtagcctactctgttctcgttgtagcgaaagtagaaaagggtaaatccaagaaactgaaatctgtcaaggagttgcttggaatcaccattatggagcgtagctccttcgagaagaacccgattgactttctggaagccaaaggatataaagaggtcaagaaagatcttatcattaagctgcctaagtattcactcttcgagctggaaaatggtcgtaaacgcatgctcgcttctgccggcgagttgcagaagggcaatgaattagcacttccatcaaagtacgttaacttcctgtatttggccagccattacgagaaactgaaggggtctccagaggacaacgaacagaaacaattatttgtagagcagcacaagcattatcttgatgaaatcattgagcaaatttccgaattcagtaaacgcgtaatcctggccgatgcaaacctcgacaaggtgctgagcgcttacaataagcatcgcgacaaacctatccgtgagcaggctgaaaatatcattcacctgttcacattaacgaacctgggcgctccggccgcttttaaatatttcgacacgacaatcgaccgtaagcgctataccagtacgaaagaagtgttggatgcgacccttattcaccagtcaattacaggattatatgagacccgtatcgaccttagccaattaggtggggatgcgccagctcctgcacctgcgatggtgagcaaaggtgaagaggataatatggccatcatcaaagaattcatgcgcttcaaagttcatatggaaggtagcgttaatggccacgaatttgaaattgaaggtgaaggcgaaggtcgtccgtatgaaggcacccagaccgcaaaactgaaagttaccaaaggtggtccgctgccgtttgcatgggatattctgagtccgcagtttatgtatggtagcaaagcctatgttaaacatccggcagatatcccggattatctgaaactgagctttccggaaggttttaaatgggaacgtgtgatgaattttgaagatggtggtgttgttaccgttacacaggatagcagcctgcaggatggtgaatttatctataaagttaaactgcgtggcacgaattttccgagtgatggtccggttatgcagaaaaaaaccatgggttgggaagcaagcagcgaacgtatgtatccggaagatggcgcactgaaaggtgaaattaaacagcgtctgaagctgaaagatggcggtcattatgatgcagaagttaaaaccacctacaaagccaaaaaaccggttcagctgcctggtgcatataacgttaacattaaactggatatcaccagccacaacgaggattataccattgttgaacagtatgaacgtgcagaaggtcgccatagtaccggtggtatggatgaactgtataaa

SEQ ID NO: 377 - DNA, 4839 bp, synthetic construct
  misc_feature 1..4839: note = SYNTHETIC
  source 1..4839: mol_type = other DNA
atggacaaaaagtactctattggcctggatatcgggaccaacagcgtcgggtgggctgttatcaccgacgagtataaagtaccttcgaaaaagttcaaagtgctgggcaacaccgatcgccattcaatcaaaaagaacttgattggtgcgctgttgtttgactccggggaaaccgccgaggcgactcgccttaaacgtacagcacgtcgccggtacactcggcgtaagaatcgcatttgctatttgcaggaaatctttagcaacgagatggcaaaagtcgatgactcgtttttccaccgcctcgaggaaagctttctggtggaggaagacaaaaagcatgagcgtcacccgatcttcggcaacattgtcgatgaagtagcgtatcatgaaaaatacccaaccatttaccacttacgcaaaaagctggtggacagcactgacaaagctgatttgcgccttatctatttagccctggcacatatgattaagtttcgtggtcacttcctgatcgaaggagacttaaatcccgacaacagtgatgttgataaattgtttattcagcttgtccaaacttacaatcaactgttcgaggaaaacccgatcaatgcctccggtgtggatgcaaaagccattttaagtgcacgccttagcaagtcccgtcgcttagaaaaccttatcgcgcagctgcccggcgagaaaaagaatggtttgtttgggaaccttattgccttgagcttaggcctcaccccgaatttcaaaagtaatttcgatcttgcagaagacgccaaattacaactgtcgaaggatacttatgatgacgatctcgataatctgttagcgcagattggtgaccaatacgccgatctttttctggcggctaaaaatctgagcgacgccatcttgctttcggatattctccgcgttaacaccgaaatcacgaaagcgcctcttagtgccagcatgattaaacgttatgatgaacaccaccaggacctgaccttactcaaagcgttggttcgccagcaactgccagagaagtacaaagaaatcttctttgatcagtcaaagaatggttatgccggctatattgacgggggtgcaagccaagaggaattctacaaatttatcaagcctattctggagaaaatggatggcaccgaagagttattggtgaagcttaaccgtgaagacctcctgcggaaacagcgcacattcgataatggttcgatcccacaccaaatccatttgggggagttacacgctattttgcgtcgccaggaagacttttaccctttcctgaaggataaccgggagaaaattgagaagatccttacctttcgtattccgtattacgtaggccccttagcacggggtaatagccgtttcgcgtggatgacacggaagtcggaagagacgatcaccccgtggaacttcgaagaggtagtcgacaagggcgcatcagcgcagtcttttattgaacgtatgacgaatttcgataaaaacttgcccaatgagaaggtgcttccgaaacattccttgttatatgaatattttacagtttacaacgagctgaccaaggttaaatacgtgacggaaggaatgcgcaagcccgcttttcttagcggtgagcaaaaaaaggcgatcgtcgacctgttattcaaaacgaatcgtaaggtgactgtaaagcaactcaaagaagattacttcaaaaagattgagtgcttcgacagcgtcgaaatctctggggtagaggatcggtttaacgcaagtttaggtacctaccatgacctgcttaaaatcattaaggataaagacttcttagataatgaagagaacgaagatattctcgaggacatcgtcttgacgttaaccttatttgaggatcgtgaaatgattgaggaacgcctcaaaacttatgcccacctgttcgacgataaggtgatgaagcagctgaaacgtcggcgctacacaggatggggccgcttgagtcgcaaacttattaacggaatccgtgacaagcaatccggcaaaacgattctggatttcttgaagtcggacggatttgctaatcgcaacttcatgcagttgatccatgatgactccctgacttttaaagaggatattcaaaaggcgcaggttagtggtcaaggcgacagcttacacgaacacatcgcaaatttggctggttcgccggccattaaaaaggggatcctccagaccgtgaaagttgtagatgagcttgttaaggtcatgggtcgtcataagcccgaaaacatcgtgattgaaatggcgcgggagaatcaaacgacccagaaaggacaaaagaatagccgtgaacggatgaagcggatcgaggaaggcattaaagagctggggtctcaaatcttgaaggaacaccctgtggagaacactcagctccaaaatgaaaaactttacctgtactatttgcagaacggacgcgatatgtacgtggaccaagagttggatattaatcggctgagtgactacgacgttgatcatatcgtcccgcagagcttcctcaaagacgattctattgacaataaggtactgacgcgctctgataaaaaccgtggtaagtcggacaacgtgccctccgaagaggttgtgaaaaagatgaaaaattattggcgccagcttttaaacgcgaagctgatcacacaacgtaaattcgataatttgaccaaggctgaacggggtggcctgagcgagttagataaggcaggatttattaaacgccagttagtggagactcgtcaaatcaccaaacatgtcgcgcagattttggacagccggatgaacaccaagtacgatgaaaatgacaaactgatccgtgaggtgaaagtcattactctgaagtccaaattagttagtgatttccggaaggactttcaattctacaaagtccgtgaaattaataactatcatcacgcacatgacgcgtacctgaatgcagtggttgggaccgcccttatcaagaaatatcctaagctggagtcggagtttgtctatggcgactataaggtatacgatgttcgcaaaatgattgcgaaatctgagcaggagatcggtaaggcaaccgcaaaatatttcttttactcaaacattatgaatttctttaagacagaaatcactctggccaacggggagattcgcaaacgtccgttgatcgaaacaaacggcgagactggcgaaattgtttgggacaaagggcgtgatttcgcgacggtgcgcaaggtactgagcatgcctcaagtcaatattgttaagaaaaccgaagtgcagacgggcgggttttccaaggaaagcatcttacccaaacgtaattcagataaacttattgcacgcaaaaaggactgggatccgaaaaagtatggaggcttcgacagtccaaccgtagcctactctgttctcgttgtagcgaaagtagaaaagggtaaatccaagaaactgaaatctgtcaaggagttgcttggaatcaccattatggagcgtagctccttcgagaagaacccgattgactttctggaagccaaaggatataaagaggtcaagaaagatcttatcattaagctgcctaagtattcactcttcgagctggaaaatggtcgtaaacgcatgctcgcttctgccggcgagttgcagaagggcaatgaattagcacttccatcaaagtacgttaacttcctgtatttggccagccattacgagaaactgaaggggtctccagaggacaacgaacagaaacaattatttgtagagcagcacaagcattatcttgatgaaatcattgagcaaatttccgaattcagtaaacgcgtaatcctggccgatgcaaacctcgacaaggtgctgagcgcttacaataagcatcgcgacaaacctatccgtgagcaggctgaaaatatcattcacctgttcacattaacgaacctgggcgctccggccgcttttaaatatttcgacacgacaatcgaccgtaagcgctataccagtacgaaagaagtgttggatgcgacccttattcaccagtcaattacaggattatatgagacccgtatcgaccttagccaattaggtggggatgctcctgcgccagctcctgcacctgcgatggtgagcaaaggtgaagaggataatatggccatcatcaaagaattcatgcgcttcaaagttcatatggaaggtagcgttaatggccacgaatttgaaattgaaggtgaaggcgaaggtcgtccgtatgaaggcacccagaccgcaaaactgaaagttaccaaaggtggtccgctgccgtttgcatgggatattctgagtccgcagtttatgtatggtagcaaagcctatgttaaacatccggcagatatcccggattatctgaaactgagctttccggaaggttttaaatgggaacgtgtgatgaattttgaagatggtggtgttgttaccgttacacaggatagcagcctgcaggatggtgaatttatctataaagttaaactgcgtggcacgaattttccgagtgatggtccggttatgcagaaaaaaaccatgggttgggaagcaagcagcgaacgtatgtatccggaagatggcgcactgaaaggtgaaattaaacagcgtctgaagctgaaagatggcggtcattatgatgcagaagttaaaaccacctacaaagccaaaaaaccggttcagctgcctggtgcatataacgttaacattaaactggatatcaccagccacaacgaggattataccattgttgaacagtatgaacgtgcagaaggtcgccatagtaccggtggtatggatgaactgtataaa

SEQ ID NO: 378 - DNA, 4845 bp, synthetic construct
  misc_feature 1..4845: note = SYNTHETIC
  source 1..4845: mol_type = other DNA
atggacaaaaagtactctattggcctggatatcgggaccaacagcgtcgggtgggctgttatcaccgacgagtataaagtaccttcgaaaaagttcaaagtgctgggcaacaccgatcgccattcaatcaaaaagaacttgattggtgcgctgttgtttgactccggggaaaccgccgaggcgactcgccttaaacgtacagcacgtcgccggtacactcggcgtaagaatcgcatttgctatttgcaggaaatctttagcaacgagatggcaaaagtcgatgactcgtttttccaccgcctcgaggaaagctttctggtggaggaagacaaaaagcatgagcgtcacccgatcttcggcaacattgtcgatgaagtagcgtatcatgaaaaatacccaaccatttaccacttacgcaaaaagctggtggacagcactgacaaagctgatttgcgccttatctatttagccctggcacatatgattaagtttcgtggtcacttcctgatcgaaggagacttaaatcccgacaacagtgatgttgataaattgtttattcagcttgtccaaacttacaatcaactgttcgaggaaaacccgatcaatgcctccggtgtggatgcaaaagccattttaagtgcacgccttagcaagtcccgtcgcttagaaaaccttatcgcgcagctgcccggcgagaaaaagaatggtttgtttgggaaccttattgccttgagcttaggcctcaccccgaatttcaaaagtaatttcgatcttgcagaagacgccaaattacaactgtcgaaggatacttatgatgacgatctcgataatctgttagcgcagattggtgaccaatacgccgatctttttctggcggctaaaaatctgagcgacgccatcttgctttcggatattctccgcgttaacaccgaaatcacgaaagcgcctcttagtgccagcatgattaaacgttatgatgaacaccaccaggacctgaccttactcaaagcgttggttcgccagcaactgccagagaagtacaaagaaatcttctttgatcagtcaaagaatggttatgccggctatattgacgggggtgcaagccaagaggaattctacaaatttatcaagcctattctggagaaaatggatggcaccgaagagttattggtgaagcttaaccgtgaagacctcctgcggaaacagcgcacattcgataatggttcgatcccacaccaaatccatttgggggagttacacgctattttgcgtcgccaggaagacttttaccctttcctgaaggataaccgggagaaaattgagaagatccttacctttcgtattccgtattacgtaggccccttagcacggggtaatagccgtttcgcgtggatgacacggaagtcggaagagacgatcaccccgtggaacttcgaagaggtagtcgacaagggcgcatcagcgcagtcttttattgaacgtatgacgaatttcgataaaaacttgcccaatgagaaggtgcttccgaaacattccttgttatatgaatattttacagtttacaacgagctgaccaaggttaaatacgtgacggaaggaatgcgcaagcccgcttttcttagcggtgagcaaaaaaaggcgatcgtcgacctgttattcaaaacgaatcgtaaggtgactgtaaagcaactcaaagaagattacttcaaaaagattgagtgcttcgacagcgtcgaaatctctggggtagaggatcggtttaacgcaagtttaggtacctaccatgacctgcttaaaatcattaaggataaagacttcttagataatgaagagaacgaagatattctcgaggacatcgtcttgacgttaaccttatttgaggatcgtgaaatgattgaggaacgcctcaaaacttatgcccacctgttcgacgataaggtgatgaagcagctgaaacgtcggcgctacacaggatggggccgcttgagtcgcaaacttattaacggaatccgtgacaagcaatccggcaaaacgattctggatttcttgaagtcggacggatttgctaatcgcaacttcatgcagttgatccatgatgactccctgacttttaaagaggatattcaaaaggcgcaggttagtggtcaaggcgacagcttacacgaacacatcgcaaatttggctggttcgccggccattaaaaaggggatcctccagaccgtgaaagttgtagatgagcttgttaaggtcatgggtcgtcataagcccgaaaacatcgtgattgaaatggcgcgggagaatcaaacgacccagaaaggacaaaagaatagccgtgaacggatgaagcggatcgaggaaggcattaaagagctggggtctcaaatcttgaaggaacaccctgtggagaacactcagctccaaaatgaaaaactttacctgtactatttgcagaacggacgcgatatgtacgtggaccaagagttggatattaatcggctgagtgactacgacgttgatcatatcgtcccgcagagcttcctcaaagacgattctattgacaataaggtactgacgcgctctgataaaaaccgtggtaagtcggacaacgtgccctccgaagaggttgtgaaaaagatgaaaaattattggcgccagcttttaaacgcgaagctgatcacacaacgtaaattcgataatttgaccaaggctgaacggggtggcctgagcgagttagataaggcaggatttattaaacgccagttagtggagactcgtcaaatcaccaaacatgtcgcgcagattttggacagccggatgaacaccaagtacgatgaaaatgacaaactgatccgtgaggtgaaagtcattactctgaagtccaaattagttagtgatttccggaaggactttcaattctacaaagtccgtgaaattaataactatcatcacgcacatgacgcgtacctgaatgcagtggttgggaccgcccttatcaagaaatatcctaagctggagtcggagtttgtctatggcgactataaggtatacgatgttcgcaaaatgattgcgaaatctgagcaggagatcggtaaggcaaccgcaaaatatttcttttactcaaacattatgaatttctttaagacagaaatcactctggccaacggggagattcgcaaacgtccgttgatcgaaacaaacggcgagactggcgaaattgtttgggacaaagggcgtgatttcgcgacggtgcgcaaggtactgagcatgcctcaagtcaatattgttaagaaaaccgaagtgcagacgggcgggttttccaaggaaagcatcttacccaaacgtaattcagataaacttattgcacgcaaaaaggactgggatccgaaaaagtatggaggcttcgacagtccaaccgtagcctactctgttctcgttgtagcgaaagtagaaaagggtaaatccaagaaactgaaatctgtcaaggagttgcttggaatcaccattatggagcgtagctccttcgagaagaacccgattgactttctggaagccaaaggatataaagaggtcaagaaagatcttatcattaagctgcctaagtattcactcttcgagctggaaaatggtcgtaaacgcatgctcgcttctgccggcgagttgcagaagggcaatgaattagcacttccatcaaagtacgttaacttcctgtatttggccagccattacgagaaactgaaggggtctccagaggacaacgaacagaaacaattatttgtagagcagcacaagcattatcttgatgaaatcattgagcaaatttccgaattcagtaaacgcgtaatcctggccgatgcaaacctcgacaaggtgctgagcgcttacaataagcatcgcgacaaacctatccgtgagcaggctgaaaatatcattcacctgttcacattaacgaacctgggcgctccggccgcttttaaatatttcgacacgacaatcgaccgtaagcgctataccagtacgaaagaagtgttggatgcgacccttattcaccagtcaattacaggattatatgagacccgtatcgaccttagccaattaggtggggatgcgcccgctcctgcgccagctcctgcacctgcgatggtgagcaaaggtgaagaggataatatggccatcatcaaagaattcatgcgcttcaaagttcatatggaaggtagcgttaatggccacgaatttgaaattgaaggtgaaggcgaaggtcgtccgtatgaaggcacccagaccgcaaaactgaaagttaccaaaggtggtccgctgccgtttgcatgggatattctgagtccgcagtttatgtatggtagcaaagcctatgttaaacatccggcagatatcccggattatctgaaactgagctttccggaaggttttaaatgggaacgtgtgatgaattttgaagatggtggtgttgttaccgttacacaggatagcagcctgcaggatggtgaatttatctataaagttaaactgcgtggcacgaattttccgagtgatggtccggttatgcagaaaaaaaccatgggttgggaagcaagcagcgaacgtatgtatccggaagatggcgcactgaaaggtgaaattaaacagcgtctgaagctgaaagatggcggtcattatgatgcagaagttaaaaccacctacaaagccaaaaaaccggttcagctgcctggtgcatataacgttaacattaaactggatatcaccagccacaacgaggattataccattgttgaacagtatgaacgtgcagaaggtcgccatagtaccggtggtatggatgaactgtataaa

SEQ ID NO: 379 - DNA, 4851 bp, synthetic construct
  misc_feature 1..4851: note = SYNTHETIC
  source 1..4851: mol_type = other DNA
atggacaaaaagtactctattggcctggatatcgggaccaacagcgtcgggtgggctgttatcaccgacgagtataaagtaccttcgaaaaagttcaaagtgctgggcaacaccgatcgccattcaatcaaaaagaacttgattggtgcgctgttgtttgactccggggaaaccgccgaggcgactcgccttaaacgtacagcacgtcgccggtacactcggcgtaagaatcgcatttgctatttgcaggaaatctttagcaacgagatggcaaaagtcgatgactcgtttttccaccgcctcgaggaaagctttctggtggaggaagacaaaaagcatgagcgtcacccgatcttcggcaacattgtcgatgaagtagcgtatcatgaaaaatacccaaccatttaccacttacgcaaaaagctggtggacagcactgacaaagctgatttgcgccttatctatttagccctggcacatatgattaagtttcgtggtcacttcctgatcgaaggagacttaaatcccgacaacagtgatgttgataaattgtttattcagcttgtccaaacttacaatcaactgttcgaggaaaacccgatcaatgcctccggtgtggatgcaaaagccattttaagtgcacgccttagcaagtcccgtcgcttagaaaaccttatcgcgcagctgcccggcgagaaaaagaatggtttgtttgggaaccttattgccttgagcttaggcctcaccccgaatttcaaaagtaatttcgatcttgcagaagacgccaaattacaactgtcgaaggatacttatgatgacgatctcgataatctgttagcgcagattggtgaccaatacgccgatctttttctggcggctaaaaatctgagcgacgccatcttgctttcggatattctccgcgttaacaccgaaatcacgaaagcgcctcttagtgccagcatgattaaacgttatgatgaacaccaccaggacctgaccttactcaaagcgttggttcgccagcaactgccagagaagtacaaagaaatcttctttgatcagtcaaagaatggttatgccggctatattgacgggggtgcaagccaagaggaattctacaaatttatcaagcctattctggagaaaatggatggcaccgaagagttattggtgaagcttaaccgtgaagacctcctgcggaaacagcgcacattcgataatggttcgatcccacaccaaatccatttgggggagttacacgctattttgcgtcgccaggaagacttttaccctttcctgaaggataaccgggagaaaattgagaagatccttacctttcgtattccgtattacgtaggccccttagcacggggtaatagccgtttcgcgtggatgacacggaagtcggaagagacgatcaccccgtggaacttcgaagaggtagtcgacaagggcgcatcagcgcagtcttttattgaacgtatgacgaatttcgataaaaacttgcccaatgagaaggtgcttccgaaacattccttgttatatgaatattttacagtttacaacgagctgaccaaggttaaatacgtgacggaaggaatgcgcaagcccgcttttcttagcggtgagcaaaaaaaggcgatcgtcgacctgttattcaaaacgaatcgtaaggtgactgtaaagcaactcaaagaagattacttcaaaaagattgagtgcttcgacagcgtcgaaatctctggggtagaggatcggtttaacgcaagtttaggtacctaccatgacctgcttaaaatcattaaggataaagacttcttagataatgaagagaacgaagatattctcgaggacatcgtcttgacgttaaccttatttgaggatcgtgaaatgattgaggaacgcctcaaaacttatgcccacctgttcgacgataaggtgatgaagcagctgaaacgtcggcgctacacaggatggggccgcttgagtcgcaaacttattaacggaatccgtgacaagcaatccggcaaaacgattctggatttcttgaagtcggacggatttgctaatcgcaacttcatgcagttgatccatgatgactccctgacttttaaagaggatattcaaaaggcgcaggttagtggtcaaggcgacagcttacacgaacacatcgcaaatttggctggttcgccggccattaaaaaggggatcctccagaccgtgaaagttgtagatgagcttgttaaggtcatgggtcgtcataagcccgaaaacatcgtgattgaaatggcgcgggagaatcaaacgacccagaaaggacaaaagaatagccgtgaacggatgaagcggatcgaggaaggcattaaagagctggggtctcaaatcttgaaggaacaccctgtggagaacactcagctccaaaatgaaaaactttacctgtactatttgcagaacggacgcgatatgtacgtggaccaagagttggatattaatcggctgagtgactacgacgttgatcatatcgtcccgcagagcttcctcaaagacgattctattgacaataaggtactgacgcgctctgataaaaaccgtggtaagtcggacaacgtgccctccgaagaggttgtgaaaaagatgaaaaattattggcgccagcttttaaacgcgaagctgatcacacaacgtaaattcgataatttgaccaaggctgaacggggtggcctgagcgagttagataaggcaggatttattaaacgccagttagtggagactcgtcaaatcaccaaacatgtcgcgcagattttggacagccggatgaacaccaagtacgatgaaaatgacaaactgatccgtgaggtgaaagtcattactctgaagtccaaattagttagtgatttccggaaggactttcaattctacaaagtccgtgaaattaataactatcatcacgcacatgacgcgtacctgaatgcagtggttgggaccgcccttatcaagaaatatcctaagctggagtcggagtttgtctatggcgactataaggtatacgatgttcgcaaaatgattgcgaaatctgagcaggagatcggtaaggcaaccgcaaaatatttcttttactcaaacattatgaatttctttaagacagaaatcactctggccaacggggagattcgcaaacgtccgttgatcgaaacaaacggcgagactggcgaaattgtttgggacaaagggcgtgatttcgcgacggtgcgcaaggtactgagcatgcctcaagtcaatattgttaagaaaaccgaagtgcagacgggcgggttttccaaggaaagcatcttacccaaacgtaattcagataaacttattgcacgcaaaaaggactgggatccgaaaaagtatggaggcttcgacagtccaaccgtagcctactctgttctcgttgtagcgaaagtagaaaagggtaaatccaagaaactgaaatctgtcaaggagttgcttggaatcaccattatggagcgtagctccttcgagaagaacccgattgactttctggaagccaaaggatataaagaggtcaagaaagatcttatcattaagctgcctaagtattcactcttcgagctggaaaatggtcgtaaacgcatgctcgcttctgccggcgagttgcagaagggcaatgaattagcacttccatcaaagtacgttaacttcctgtatttggccagccattacgagaaactgaaggggtctccagaggacaacgaacagaaacaattatttgtagagcagcacaagcattatcttgatgaaatcattgagcaaatttccgaattcagtaaacgcgtaatcctggccgatgcaaacctcgacaaggtgctgagcgcttacaataagcatcgcgacaaacctatccgtgagcaggctgaaaatatcattcacctgttcacattaacgaacctgggcgctccggccgcttttaaatatttcgacacgacaatcgaccgtaagcgctataccagtacgaaagaagtgttggatgcgacccttattcaccagtcaattacaggattatatgagacccgtatcgaccttagccaattaggtggggatgcgccagcgcctgctcctgcacccgctccagcacctgcgatggtgagcaaaggtgaagaggataatatggccatcatcaaagaattcatgcgcttcaaagttcatatggaaggtagcgttaatggccacgaatttgaaattgaaggtgaaggcgaaggtcgtccgtatgaaggcacccagaccgcaaaactgaaagttaccaaaggtggtccgctgccgtttgcatgggatattctgagtccgcagtttatgtatggtagcaaagcctatgttaaacatccggcagatatcccggattatctgaaactgagctttccggaaggttttaaatgggaacgtgtgatgaattttgaagatggtggtgttgttaccgttacacaggatagcagcctgcaggatggtgaatttatctataaagttaaactgcgtggcacgaattttccgagtgatggtccggttatgcagaaaaaaaccatgggttgggaagcaagcagcgaacgtatgtatccggaagatggcgcactgaaaggtgaaattaaacagcgtctgaagctgaaagatggcggtcattatgatgcagaagttaaaaccacctacaaagccaaaaaaccggttcagctgcctggtgcatataacgttaacattaaactggatatcaccagccacaacgaggattataccattgttgaacagtatgaacgtgcagaaggtcgccatagtaccggtggtatggatgaactgtataaa

SEQ ID NO: 380 - DNA, 4857 bp, synthetic construct
  misc_feature 1..4857: note = SYNTHETIC
  source 1..4857: mol_type = other DNA
atggacaaaaagtactctattggcctggatatcgggaccaacagcgtcgggtgggctgttatcaccgacgagtataaagtaccttcgaaaaagttcaaagtgctgggcaacaccgatcgccattcaatcaaaaagaacttgattggtgcgctgttgtttgactccggggaaaccgccgaggcgactcgccttaaacgtacagcacgtcgccggtacactcggcgtaagaatcgcatttgctatttgcaggaaatctttagcaacgagatggcaaaagtcgatgactcgtttttccaccgcctcgaggaaagctttctggtggaggaagacaaaaagcatgagcgtcacccgatcttcggcaacattgtcgatgaagtagcgtatcatgaaaaatacccaaccatttaccacttacgcaaaaagctggtggacagcactgacaaagctgatttgcgccttatctatttagccctggcacatatgattaagtttcgtggtcacttcctgatcgaaggagacttaaatcccgacaacagtgatgttgataaattgtttattcagcttgtccaaacttacaatcaactgttcgaggaaaacccgatcaatgcctccggtgtggatgcaaaagccattttaagtgcacgccttagcaagtcccgtcgcttagaaaaccttatcgcgcagctgcccggcgagaaaaagaatggtttgtttgggaaccttattgccttgagcttaggcctcaccccgaatttcaaaagtaatttcgatcttgcagaagacgccaaattacaactgtcgaaggatacttatgatgacgatctcgataatctgttagcgcagattggtgaccaatacgccgatctttttctggcggctaaaaatctgagcgacgccatcttgctttcggatattctccgcgttaacaccgaaatcacgaaagcgcctcttagtgccagcatgattaaacgttatgatgaacaccaccaggacctgaccttactcaaagcgttggttcgccagcaactgccagagaagtacaaagaaatcttctttgatcagtcaaagaatggttatgccggctatattgacgggggtgcaagccaagaggaattctacaaatttatcaagcctattctggagaaaatggatggcaccgaagagttattggtgaagcttaaccgtgaagacctcctgcggaaacagcgcacattcgataatggttcgatcccacaccaaatccatttgggggagttacacgctattttgcgtcgccaggaagacttttaccctttcctgaaggataaccgggagaaaattgagaagatccttacctttcgtattccgtattacgtaggccccttagcacggggtaatagccgtttcgcgtggatgacacggaagtcggaagagacgatcaccccgtggaacttcgaagaggtagtcgacaagggcgcatcagcgcagtcttttattgaacgtatgacgaatttcgataaaaacttgcccaatgagaaggtgcttccgaaacattccttgttatatgaatattttacagtttacaacgagctgaccaaggttaaatacgtgacggaaggaatgcgcaagcccgcttttcttagcggtgagcaaaaaaaggcgatcgtcgacctgttattcaaaacgaatcgtaaggtgactgtaaagcaactcaaagaagattacttcaaaaagattgagtgcttcgacagcgtcgaaatctctggggtagaggatcggtttaacgcaagtttaggtacctaccatgacctgcttaaaatcattaaggataaagacttcttagataatgaagagaacgaagatattctcgaggacatcgtcttgacgttaaccttatttgaggatcgtgaaatgattgaggaacgcctcaaaacttatgcccacctgttcgacgataaggtgatgaagcagctgaaacgtcggcgctacacaggatggggccgcttgagtcgcaaacttattaacggaatccgtgacaagcaatccggcaaaacgattctggatttcttgaagtcggacggatttgctaatcgcaacttcatgcagttgatccatgatgactccctgacttttaaagaggatattcaaaaggcgcaggttagtggtcaaggcgacagcttacacgaacacatcgcaaatttggctggttcgccggccattaaaaaggggatcctccagaccgtgaaagttgtagatgagcttgttaaggtcatgggtcgtcataagcccgaaaacatcgtgattgaaatggcgcgggagaatcaaacgacccagaaaggacaaaagaatagccgtgaacggatgaagcggatcgaggaaggcattaaagagctggggtctcaaatcttgaaggaacaccctgtggagaacactcagctccaaaatgaaaaactttacctgtactatttgcagaacggacgcgatatgtacgtggaccaagagttggatattaatcggctgagtgactacgacgttgatcatatcgtcccgcagagcttcctcaaagacgattctattgacaataaggtactgacgcgctctgataaaaaccgtggtaagtcggacaacgtgccctccgaagaggttgtgaaaaagatgaaaaattattggcgccagcttttaaacgcgaagctgatcacacaacgtaaattcgataatttgaccaaggctgaacggggtggcctgagcgagttagataaggcaggatttattaaacgccagttagtggagactcgtcaaatcaccaaacatgtcgcgcagattttggacagccggatgaacaccaagtacgatgaaaatgacaaactgatccgtgaggtgaaagtcattactctgaagtccaaattagttagtgatttccggaaggactttcaattctacaaagtccgtgaaattaataactatcatcacgcacatgacgcgtacctgaatgcagtggttgggaccgcccttatcaagaaatatcctaagctggagtcggagtttgtctatggcgactataaggtatacgatgttcgcaaaatgattgcgaaatctgagcaggagatcggtaaggcaaccgcaaaatatttcttttactcaaacattatgaatttctttaagacagaaatcactctggccaacggggagattcgcaaacgtccgttgatcgaaacaaacggcgagactggcgaaattgtttgggacaaagggcgtgatttcgcgacggtgcgcaaggtactgagcatgcctcaagtcaatattgttaagaaaaccgaagtgcagacgggcgggttttccaaggaaagcatcttacccaaacgtaattcagataaacttattgcacgcaaaaaggactgggatccgaaaaagtatggaggcttcgacagtccaaccgtagcctactctgttctcgttgtagcgaaagtagaaaagggtaaatccaagaaactgaaatctgtcaaggagttgcttggaatcaccattatggagcgtagctccttcgagaagaacccgattgactttctggaagccaaaggatataaagaggtcaagaaagatcttatcattaagctgcctaagtattcactcttcgagctggaaaatggtcgtaaacgcatgctcgcttctgccggcgagttgcagaagggcaatgaattagcacttccatcaaagtacgttaacttcctgtatttggccagccattacgagaaactgaaggggtctccagaggacaacgaacagaaacaattatttgtagagcagcacaagcattatcttgatgaaatcattgagcaaatttccgaattcagtaaacgcgtaatcctggccgatgcaaacctcgacaaggtgctgagcgcttacaataagcatcgcgacaaacctatccgtgagcaggctgaaaatatcattcacctgttcacattaacgaacctgggcgctccggccgcttttaaatatttcgacacgacaatcgaccgtaagcgctataccagtacgaaagaagtgttggatgcgacccttattcaccagtcaattacaggattatatgagacccgtatcgaccttagccaattaggtggggatgcgccagcgcctgctcctgcacccgctccagctcctgccccagcgatggtgagcaaaggtgaagaggataatatggccatcatcaaagaattcatgcgcttcaaagttcatatggaaggtagcgttaatggccacgaatttgaaattgaaggtgaaggcgaaggtcgtccgtatgaaggcacccagaccgcaaaactgaaagttaccaaaggtggtccgctgccgtttgcatgggatattctgagtccgcagtttatgtatggtagcaaagcctatgttaaacatccggcagatatcccggattatctgaaactgagctttccggaaggttttaaatgggaacgtgtgatgaattttgaagatggtggtgttgttaccgttacacaggatagcagcctgcaggatggtgaatttatctataaagttaaactgcgtggcacgaattttccgagtgatggtccggttatgcagaaaaaaaccatgggttgggaagcaagcagcgaacgtatgtatccggaagatggcgcactgaaaggtgaaattaaacagcgtctgaagctgaaagatggcggtcattatgatgcagaagttaaaaccacctacaaagccaaaaaaccggttcagctgcctggtgcatataacgttaacattaaactggatatcaccagccacaacgaggattataccattgttgaacagtatgaacgtgcagaaggtcgccatagtaccggtggtatggatgaactgtataaa

SEQ ID NO: 381 - DNA, 4863 bp, synthetic construct
  misc_feature 1..4863: note = SYNTHETIC
  source 1..4863: mol_type = other DNA
atggacaaaaagtactctattggcctggatatcgggaccaacagcgtcgggtgggctgttatcaccgacgagtataaagtaccttcgaaaaagttcaaagtgctgggcaacaccgatcgccattcaatcaaaaagaacttgattggtgcgctgttgtttgactccggggaaaccgccgaggcgactcgccttaaacgtacagcacgtcgccggtacactcggcgtaagaatcgcatttgctatttgcaggaaatctttagcaacgagatggcaaaagtcgatgactcgtttttccaccgcctcgaggaaagctttctggtggaggaagacaaaaagcatgagcgtcacccgatcttcggcaacattgtcgatgaagtagcgtatcatgaaaaatacccaaccatttaccacttacgcaaaaagctggtggacagcactgacaaagctgatttgcgccttatctatttagccctggcacatatgattaagtttcgtggtcacttcctgatcgaaggagacttaaatcccgacaacagtgatgttgataaattgtttattcagcttgtccaaacttacaatcaactgttcgaggaaaacccgatcaatgcctccggtgtggatgcaaaagccattttaagtgcacgccttagcaagtcccgtcgcttagaaaaccttatcgcgcagctgcccggcgagaaaaagaatggtttgtttgggaaccttattgccttgagcttaggcctcaccccgaatttcaaaagtaatttcgatcttgcagaagacgccaaattacaactgtcgaaggatacttatgatgacgatctcgataatctgttagcgcagattggtgaccaatacgccgatctttttctggcggctaaaaatctgagcgacgccatcttgctttcggatattctccgcgttaacaccgaaatcacgaaagcgcctcttagtgccagcatgattaaacgttatgatgaacaccaccaggacctgaccttactcaaagcgttggttcgccagcaactgccagagaagtacaaagaaatcttctttgatcagtcaaagaatggttatgccggctatattgacgggggtgcaagccaagaggaattctacaaatttatcaagcctattctggagaaaatggatggcaccgaagagttattggtgaagcttaaccgtgaagacctcctgcggaaacagcgcacattcgataatggttcgatcccacaccaaatccatttgggggagttacacgctattttgcgtcgccaggaagacttttaccctttcctgaaggataaccgggagaaaattgagaagatccttacctttcgtattccgtattacgtaggccccttagcacggggtaatagccgtttcgcgtggatgacacggaagtcggaagagacgatcaccccgtggaacttcgaagaggtagtcgacaagggcgcatcagcgcagtcttttattgaacgtatgacgaatttcgataaaaacttgcccaatgagaaggtgcttccgaaacattccttgttatatgaatattttacagtttacaacgagctgaccaaggttaaatacgtgacggaaggaatgcgcaagcccgcttttcttagcggtgagcaaaaaaaggcgatcgtcgacctgttattcaaaacgaatcgtaaggtgactgtaaagcaactcaaagaagattacttcaaaaagattgagtgcttcgacagcgtcgaaatctctggggtagaggatcggtttaacgcaagtttaggtacctaccatgacctgcttaaaatcattaaggataaagacttcttagataatgaagagaacgaagatattctcgaggacatcgtcttgacgttaaccttatttgaggatcgtgaaatgattgaggaacgcctcaaaacttatgcccacctgttcgacgataaggtgatgaagcagctgaaacgtcggcgctacacaggatggggccgcttgagtcgcaaacttattaacggaatccgtgacaagcaatccggcaaaacgattctggatttcttgaagtcggacggatttgctaatcgcaacttcatgcagttgatccatgatgactccctgacttttaaagaggatattcaaaaggcgcaggttagtggtcaaggcgacagcttacacgaacacatcgcaaatttggctggttcgccggccattaaaaaggggatcctccagaccgtgaaagttgtagatgagcttgttaaggtcatgggtcgtcataagcccgaaaacatcgtgattgaaatggcgcgggagaatcaaacgacccagaaaggacaaaagaatagccgtgaacggatgaagcggatcgaggaaggcattaaagagctggggtctcaaatcttgaaggaacaccctgtggagaacactcagctccaaaatgaaaaactttacctgtactatttgcagaacggacgcgatatgtacgtggaccaagagttggatattaatcggctgagtgactacgacgttgatcatatcgtcccgcagagcttcctcaaagacgattctattgacaataaggtactgacgcgctctgataaaaaccgtggtaagtcggacaacgtgccctccgaagaggttgtgaaaaagatgaaaaattattggcgccagcttttaaacgcgaagctgatcacacaacgtaaattcgataatttgaccaaggctgaacggggtggcctgagcgagttagataaggcaggatttattaaacgccagttagtggagactcgtcaaatcaccaaacatgtcgcgcagattttggacagccggatgaacaccaagtacgatgaaaatgacaaactgatccgtgaggtgaaagtcattactctgaagtccaaattagttagtgatttccggaaggactttcaattctacaaagtccgtgaaattaataactatcatcacgcacatgacgcgtacctgaatgcagtggttgggaccgcccttatcaagaaatatcctaagctggagtcggagtttgtctatggcgactataaggtatacgatgttcgcaaaatgattgcgaaatctgagcaggagatcggtaaggcaaccgcaaaatatttcttttactcaaacattatgaatttctttaagacagaaatcactctggccaacggggagattcgcaaacgtccgttgatcgaaacaaacggcgagactggcgaaattgtttgggacaaagggcgtgatttcgcgacggtgcgcaaggtactgagcatgcctcaagtcaatattgttaagaaaaccgaagtgcagacgggcgggttttccaaggaaagcatcttacccaaacgtaattcagataaacttattgcacgcaaaaaggactgggatccgaaaaagtatggaggcttcgacagtccaaccgtagcctactctgttctcgttgtagcgaaagtagaaaagggtaaatccaagaaactgaaatctgtcaaggagttgcttggaatcaccattatggagcgtagctccttcgagaagaacccgattgactttctggaagccaaaggatataaagaggtcaagaaagatcttatcattaagctgcctaagtattcactcttcgagctggaaaatggtcgtaaacgcatgctcgcttctgccggcgagttgcagaagggcaatgaattagcacttccatcaaagtacgttaacttcctgtatttggccagccattacgagaaactgaaggggtctccagaggacaacgaacagaaacaattatttgtagagcagcacaagcattatcttgatgaaatcattgagcaaatttccgaattcagtaaacgcgtaatcctggccgatgcaaacctcgacaaggtgctgagcgcttacaataagcatcgcgacaaacctatccgtgagcaggctgaaaatatcattcacctgttcacattaacgaacctgggcgctccggccgcttttaaatatttcgacacgacaatcgaccgtaagcgctataccagtacgaaagaagtgttggatgcgacccttattcaccagtcaattacaggattatatgagacccgtatcgaccttagccaattaggtggggatgcgccagcgcctgctcctgcacccgctccagcgccagctcctgcacctgcgatggtgagcaaaggtgaagaggataatatggccatcatcaaagaattcatgcgcttcaaagttcatatggaaggtagcgttaatggccacgaatttgaaattgaaggtgaaggcgaaggtcgtccgtatgaaggcacccagaccgcaaaactgaaagttaccaaaggtggtccgctgccgtttgcatgggatattctgagtccgcagtttatgtatggtagcaaagcctatgttaaacatccggcagatatcccggattatctgaaactgagctttccggaaggttttaaatgggaacgtgtgatgaattttgaagatggtggtgttgttaccgttacacaggatagcagcctgcaggatggtgaatttatctataaagttaaactgcgtggcacgaattttccgagtgatggtccggttatgcagaaaaaaaccatgggttgggaagcaagcagcgaacgtatgtatccggaagatggcgcactgaaaggtgaaattaaacagcgtctgaagctgaaagatggcggtcattatgatgcagaagttaaaaccacctacaaagccaaaaaaccggttcagctgcctggtgcatataacgttaacattaaactggatatcaccagccacaacgaggattataccattgttgaacagtatgaacgtgcagaaggtcgccatagtaccggtggtatggatgaactgtataaa

SEQ ID NO: 382 - DNA, 4869 bp, synthetic construct
  misc_feature 1..4869: note = SYNTHETIC
  source 1..4869: mol_type = other DNA
atggacaaaaagtactctattggcctggatatcgggaccaacagcgtcgggtgggctgttatcaccgacgagtataaagtaccttcgaaaaagttcaaagtgctgggcaacaccgatcgccattcaatcaaaaagaacttgattggtgcgctgttgtttgactccggggaaaccgccgaggcgactcgccttaaacgtacagcacgtcgccggtacactcggcgtaagaatcgcatttgctatttgcaggaaatctttagcaacgagatggcaaaagtcgatgactcgtttttccaccgcctcgaggaaagctttctggtggaggaagacaaaaagcatgagcgtcacccgatcttcggcaacattgtcgatgaagtagcgtatcatgaaaaatacccaaccatttaccacttacgcaaaaagctggtggacagcactgacaaagctgatttgcgccttatctatttagccctggcacatatgattaagtttcgtggtcacttcctgatcgaaggagacttaaatcccgacaacagtgatgttgataaattgtttattcagcttgtccaaacttacaatcaactgttcgaggaaaacccgatcaatgcctccggtgtggatgcaaaagccattttaagtgcacgccttagcaagtcccgtcgcttagaaaaccttatcgcgcagctgcccggcgagaaaaagaatggtttgtttgggaaccttattgccttgagcttaggcctcaccccgaatttcaaaagtaatttcgatcttgcagaagacgccaaattacaactgtcgaaggatacttatgatgacgatctcgataatctgttagcgcagattggtgaccaatacgccgatctttttctggcggctaaaaatctgagcgacgccatcttgctttcggatattctccgcgttaacaccgaaatcacgaaagcgcctcttagtgccagcatgattaaacgttatgatgaacaccaccaggacctgaccttactcaaagcgttggttcgccagcaactgccagagaagtacaaagaaatcttctttgatcagtcaaagaatggttatgccggctatattgacgggggtgcaagccaagaggaattctacaaatttatcaagcctattctggagaaaatggatggcaccgaagagttattggtgaagcttaaccgtgaagacctcctgcggaaacagcgcacattcgataatggttcgatcccacaccaaatccatttgggggagttacacgctattttgcgtcgccaggaagacttttaccctttcctgaaggataaccgggagaaaattgagaagatccttacctttcgtattccgtattacgtaggccccttagcacggggtaatagccgtttcgcgtggatgacacggaagtcggaagagacgatcaccccgtggaacttcgaagaggtagtcgacaagggcgcatcagcgcagtcttttattgaacgtatgacgaatttcgataaaaacttgcccaatgagaaggtgcttccgaaacattccttgttatatgaatattttacagtttacaacgagctgaccaaggttaaatacgtgacggaaggaatgcgcaagcccgcttttcttagcggtgagcaaaaaaaggcgatcgtcgacctgttattcaaaacgaatcgtaaggtgactgtaaagcaactcaaagaagattacttcaaaaagattgagtgcttcgacagcgtcgaaatctctggggtagaggatcggtttaacgcaagtttaggtacctaccatgacctgcttaaaatcattaaggataaagacttcttagataatgaagagaacgaagatattctcgaggacatcgtcttgacgttaaccttatttgaggatcgtgaaatgattgaggaacgcctcaaaacttatgcccacctgttcgacgataaggtgatgaagcagctgaaacgtcggcgctacacaggatggggccgcttgagtcgcaaacttattaacggaatccgtgacaagcaatccggcaaaacgattctggatttcttgaagtcggacggatttgctaatcgcaacttcatgcagttgatccatgatgactccctgacttttaaagaggatattcaaaaggcgcaggttagtggtcaaggcgacagcttacacgaacacatcgcaaatttggctggttcgccggccattaaaaaggggatcctccagaccgtgaaagttgtagatgagcttgttaaggtcatgggtcgtcataagcccgaaaacatcgtgattgaaatggcgcgggagaatcaaacgacccagaaaggacaaaagaatagccgtgaacggatgaagcggatcgaggaaggcattaaagagctggggtctcaaatcttgaaggaacaccctgtggagaacactcagctccaaaatgaaaaactttacctgtactatttgcagaacggacgcgatatgtacgtggaccaagagttggatattaatcggctgagtgactacgacgttgatcatatcgtcccgcagagcttcctcaaagacgattctattgacaataaggtactgacgcgctctgataaaaaccgtggtaagtcggacaacgtgccctccgaagaggttgtgaaaaagatgaaaaattattggcgccagcttttaaacgcgaagctgatcacacaacgtaaattcgataatttgaccaaggctgaacggggtggcctgagcgagttagataaggcaggatttattaaacgccagttagtggagactcgtcaaatcaccaaacatgtcgcgcagattttggacagccggatgaacaccaagtacgatgaaaatgacaaactgatccgtgaggtgaaagtcattactctgaagtccaaattagttagtgatttccggaaggactttcaattctacaaagtccgtgaaattaataactatcatcacgcacatgacgcgtacctgaatgcagtggttgggaccgcccttatcaagaaatatcctaagctggagtcggagtttgtctatggcgactataaggtatacgatgttcgcaaaatgattgcgaaatctgagcaggagatcggtaaggcaaccgcaaaatatttcttttactcaaacattatgaatttctttaagacagaaatcactctggccaacggggagattcgcaaacgtccgttgatcgaaacaaacggcgagactggcgaaattgtttgggacaaagggcgtgatttcgcgacggtgcgcaaggtactgagcatgcctcaagtcaatattgttaagaaaaccgaagtgcagacgggcgggttttccaaggaaagcatcttacccaaacgtaattcagataaacttattgcacgcaaaaaggactgggatccgaaaaagtatggaggcttcgacagtccaaccgtagcctactctgttctcgttgtagcgaaagtagaaaagggtaaatccaagaaactgaaatctgtcaaggagttgcttggaatcaccattatggagcgtagctccttcgagaagaacccgattgactttctggaagccaaaggatataaagaggtcaagaaagatcttatcattaagctgcctaagtattcactcttcgagctggaaaatggtcgtaaacgcatgctcgcttctgccggcgagttgcagaagggcaatgaattagcacttccatcaaagtacgttaacttcctgtatttggccagccattacgagaaactgaaggggtctccagaggacaacgaacagaaacaattatttgtagagcagcacaagcattatcttgatgaaatcattgagcaaatttccgaattcagtaaacgcgtaatcctggccgatgcaaacctcgacaaggtgctgagcgcttacaataagcatcgcgacaaacctatccgtgagcaggctgaaaatatcattcacctgttcacattaacgaacctgggcgctccggccgcttttaaatatttcgacacgacaatcgaccgtaagcgctataccagtacgaaagaagtgttggatgcgacccttattcaccagtcaattacaggattatatgagacccgtatcgaccttagccaattaggtggggatgcgccagcgcctgctcctgcacccgctccagctcctgcgccagctcctgcacctgcgatggtgagcaaaggtgaagaggataatatggccatcatcaaagaattcatgcgcttcaaagttcatatggaaggtagcgttaatggccacgaatttgaaattgaaggtgaaggcgaaggtcgtccgtatgaaggcacccagaccgcaaaactgaaagttaccaaaggtggtccgctgccgtttgcatgggatattctgagtccgcagtttatgtatggtagcaaagcctatgttaaacatccggcagatatcccggattatctgaaactgagctttccggaaggttttaaatgggaacgtgtgatgaattttgaagatggtggtgttgttaccgttacacaggatagcagcctgcaggatggtgaatttatctataaagttaaactgcgtggcacgaattttccgagtgatggtccggttatgcagaaaaaaaccatgggttgggaagcaagcagcgaacgtatgtatccggaagatggcgcactgaaaggtgaaattaaacagcgtctgaagctgaaagatggcggtcattatgatgcagaagttaaaaccacctacaaagccaaaaaaccggttcagctgcctggtgcatataacgttaacattaaactggatatcaccagccacaacgaggattataccattgttgaacagtatgaacgtgcagaaggtcgccatagtaccggtggtatggatgaactgtataaa

SEQ ID NO: 383 - DNA, 4875 bp, synthetic construct
  misc_feature 1..4875: note = SYNTHETIC
  source 1..4875: mol_type = other DNA
atggacaaaaagtactctattggcctggatatcgggaccaacagcgtcgggtgggctgttatcaccgacgagtataaagtaccttcgaaaaagttcaaagtgctgggcaacaccgatcgccattcaatcaaaaagaacttgattggtgcgctgttgtttgactccggggaaaccgccgaggcgactcgccttaaacgtacagcacgtcgccggtacactcggcgtaagaatcgcatttgctatttgcaggaaatctttagcaacgagatggcaaaagtcgatgactcgtttttccaccgcctcgaggaaagctttctggtggaggaagacaaaaagcatgagcgtcacccgatcttcggcaacattgtcgatgaagtagcgtatcatgaaaaatacccaaccatttaccacttacgcaaaaagctggtggacagcactgacaaagctgatttgcgccttatctatttagccctggcacatatgattaagtttcgtggtcacttcctgatcgaaggagacttaaatcccgacaacagtgatgttgataaattgtttattcagcttgtccaaacttacaatcaactgttcgaggaaaacccgatcaatgcctccggtgtggatgcaaaagccattttaagtgcacgccttagcaagtcccgtcgcttagaaaaccttatcgcgcagctgcccggcgagaaaaagaatggtttgtttgggaaccttattgccttgagcttaggcctcaccccgaatttcaaaagtaatttcgatcttgcagaagacgccaaattacaactgtcgaaggatacttatgatgacgatctcgataatctgttagcgcagattggtgaccaatacgccgatctttttctggcggctaaaaatctgagcgacgccatcttgctttcggatattctccgcgttaacaccgaaatcacgaaagcgcctcttagtgccagcatgattaaacgttatgatgaacaccaccaggacctgaccttactcaaagcgttggttcgccagcaactgccagagaagtacaaagaaatcttctttgatcagtcaaagaatggttatgccggctatattgacgggggtgcaagccaagaggaattctacaaatttatcaagcctattctggagaaaatggatggcaccgaagagttattggtgaagcttaaccgtgaagacctcctgcggaaacagcgcacattcgataatggttcgatcccacaccaaatccatttgggggagttacacgctattttgcgtcgccaggaagacttttaccctttcctgaaggataaccgggagaaaattgagaagatccttacctttcgtattccgtattacgtaggccccttagcacggggtaatagccgtttcgcgtggatgacacggaagtcggaagagacgatcaccccgtggaacttcgaagaggtagtcgacaagggcgcatcagcgcagtcttttattgaacgtatgacgaatttcgataaaaacttgcccaatgagaaggtgcttccgaaacattccttgttatatgaatattttacagtttacaacgagctgaccaaggttaaatacgtgacggaaggaatgcgcaagcccgcttttcttagcggtgagcaaaaaaaggcgatcgtcgacctgttattcaaaacgaatcgtaaggtgactgtaaagcaactcaaagaagattacttcaaaaagattgagtgcttcgacagcgtcgaaatctctggggtagaggatcggtttaacgcaagtttaggtacctaccatgacctgcttaaaatcattaaggataaagacttcttagataatgaagagaacgaagatattctcgaggacatcgtcttgacgttaaccttatttgaggatcgtgaaatgattgaggaacgcctcaaaacttatgcccacctgttcgacgataaggtgatgaagcagctgaaacgtcggcgctacacaggatggggccgcttgagtcgcaaacttattaacggaatccgtgacaagcaatccggcaaaacgattctggatttcttgaagtcggacggatttgctaatcgcaacttcatgcagttgatccatgatgactccctgacttttaaagaggatattcaaaaggcgcaggttagtggtcaaggcgacagcttacacgaacacatcgcaaatttggctggttcgccggccattaaaaaggggatcctccagaccgtgaaagttgtagatgagcttgttaaggtcatgggtcgtcataagcccgaaaacatcgtgattgaaatggcgcgggagaatcaaacgacccagaaaggacaaaagaatagccgtgaacggatgaagcggatcgaggaaggcattaaagagctggggtctcaaatcttgaaggaacaccctgtggagaacactcagctccaaaatgaaaaactttacctgtactatttgcagaacggacgcgatatgtacgtggaccaagagttggatattaatcggctgagtgactacgacgttgatcatatcgtcccgcagagcttcctcaaagacgattctattgacaataaggtactgacgcgctctgataaaaaccgtggtaagtcggacaacgtgccctccgaagaggttgtgaaaaagatgaaaaattattggcgccagcttttaaacgcgaagctgatcacacaacgtaaattcgataatttgaccaaggctgaacggggtggcctgagcgagttagataaggcaggatttattaaacgccagttagtggagactcgtcaaatcaccaaacatgtcgcgcagattttggacagccggatgaacaccaagtacgatgaaaatgacaaactgatccgtgaggtgaaagtcattactctgaagtccaaattagttagtgatttccggaaggactttcaattctacaaagtccgtgaaattaataactatcatcacgcacatgacgcgtacctgaatgcagtggttgggaccgcccttatcaagaaatatcctaagctggagtcggagtttgtctatggcgactataaggtatacgatgttcgcaaaatgattgcgaaatctgagcaggagatcggtaaggcaaccgcaaaatatttcttttactcaaacattatgaatttctttaagacagaaatcactctggccaacggggagattcgcaaacgtccgttgatcgaaacaaacggcgagactggcgaaattgtttgggacaaagggcgtgatttcgcgacggtgcgcaaggtactgagcatgcctcaagtcaatattgttaagaaaaccgaagtgcagacgggcgggttttccaaggaaagcatcttacccaaacgtaattcagataaacttattgcacgcaaaaaggactgggatccgaaaaagtatggaggcttcgacagtccaaccgtagcctactctgttctcgttgtagcgaaagtagaaaagggtaaatccaagaaactgaaatctgtcaaggagttgcttggaatcaccattatggagcgtagctccttcgagaagaacccgattgactttctggaagccaaaggatataaagaggtcaagaaagatcttatcattaagctgcctaagtattcactcttcgagctggaaaatggtcgtaaacgcatgctcgcttctgccggcgagttgcagaagggcaatgaattagcacttccatcaaagtacgttaacttcctgtatttggccagccattacgagaaactgaaggggtctccagaggacaacgaacagaaacaattatttgtagagcagcacaagcattatcttgatgaaatcattgagcaaatttccgaattcagtaaacgcgtaatcctggccgatgcaaacctcgacaaggtgctgagcgcttacaataagcatcgcgacaaacctatccgtgagcaggctgaaaatatcattcacctgttcacattaacgaacctgggcgctccggccgcttttaaatatttcgacacgacaatcgaccgtaagcgctataccagtacgaaagaagtgttggatgcgacccttattcaccagtcaattacaggattatatgagacccgtatcgaccttagccaattaggtggggatgcgccagcgcctgctcctgcacccgctccagctcctgctcctgcgccagctcctgcacctgcgatggtgagcaaaggtgaagaggataatatggccatcatcaaagaattcatgcgcttcaaagttcatatggaaggtagcgttaatggccacgaatttgaaattgaaggtgaaggcgaaggtcgtccgtatgaaggcacccagaccgcaaaactgaaagttaccaaaggtggtccgctgccgtttgcatgggatattctgagtccgcagtttatgtatggtagcaaagcctatgttaaacatccggcagatatcccggattatctgaaactgagctttccggaaggttttaaatgggaacgtgtgatgaattttgaagatggtggtgttgttaccgttacacaggatagcagcctgcaggatggtgaatttatctataaagttaaactgcgtggcacgaattttccgagtgatggtccggttatgcagaaaaaaaccatgggttgggaagcaagcagcgaacgtatgtatccggaagatggcgcactgaaaggtgaaattaaacagcgtctgaagctgaaagatggcggtcattatgatgcagaagttaaaaccacctacaaagccaaaaaaccggttcagctgcctggtgcatataacgttaacattaaactggatatcaccagccacaacgaggattataccattgttgaacagtatgaacgtgcagaaggtcgccatagtaccggtggtatggatgaactgtataaa

SEQ ID NO: 384 - DNA, 4881 bp, synthetic construct
  misc_feature 1..4881: note = SYNTHETIC
  source 1..4881: mol_type = other DNA
atggacaaaaagtactctattggcctggatatcgggaccaacagcgtcgggtgggctgttatcaccgacgagtataaagtaccttcgaaaaagttcaaagtgctgggcaacaccgatcgccattcaatcaaaaagaacttgattggtgcgctgttgtttgactccggggaaaccgccgaggcgactcgccttaaacgtacagcacgtcgccggtacactcggcgtaagaatcgcatttgctatttgcaggaaatctttagcaacgagatggcaaaagtcgatgactcgtttttccaccgcctcgaggaaagctttctggtggaggaagacaaaaagcatgagcgtcacccgatcttcggcaacattgtcgatgaagtagcgtatcatgaaaaatacccaaccatttaccacttacgcaaaaagctggtggacagcactgacaaagctgatttgcgccttatctatttagccctggcacatatgattaagtttcgtggtcacttcctgatcgaaggagacttaaatcccgacaacagtgatgttgataaattgtttattcagcttgtccaaacttacaatcaactgttcgaggaaaacccgatcaatgcctccggtgtggatgcaaaagccattttaagtgcacgccttagcaagtcccgtcgcttagaaaaccttatcgcgcagctgcccggcgagaaaaagaatggtttgtttgggaaccttattgccttgagcttaggcctcaccccgaatttcaaaagtaatttcgatcttgcagaagacgccaaattacaactgtcgaaggatacttatgatgacgatctcgataatctgttagcgcagattggtgaccaatacgccgatctttttctggcggctaaaaatctgagcgacgccatcttgctttcggatattctccgcgttaacaccgaaatcacgaaagcgcctcttagtgccagcatgattaaacgttatgatgaacaccaccaggacctgaccttactcaaagcgttggttcgccagcaactgccagagaagtacaaagaaatcttctttgatcagtcaaagaatggttatgccggctatattgacgggggtgcaagccaagaggaattctacaaatttatcaagcctattctggagaaaatggatggcaccgaagagttattggtgaagcttaaccgtgaagacctcctgcggaaacagcgcacattcgataatggttcgatcccacaccaaatccatttgggggagttacacgctattttgcgtcgccaggaagacttttaccctttcctgaaggataaccgggagaaaattgagaagatccttacctttcgtattccgtattacgtaggccccttagcacggggtaatagccgtttcgcgtggatgacacggaagtcggaagagacgatcaccccgtggaacttcgaagaggtagtcgacaagggcgcatcagcgcagtcttttattgaacgtatgacgaatttcgataaaaacttgcccaatgagaaggtgcttccgaaacattccttgttatatgaatattttacagtttacaacgagctgaccaaggttaaatacgtgacggaaggaatgcgcaagcccgcttttcttagcggtgagcaaaaaaaggcgatcgtcgacctgttattcaaaacgaatcgtaaggtgactgtaaagcaactcaaagaagattacttcaaaaagattgagtgcttcgacagcgtcgaaatctctggggtagaggatcggtttaacgcaagtttaggtacctaccatgacctgcttaaaatcattaaggataaagacttcttagataatgaagagaacgaagatattctcgaggacatcgtcttgacgttaaccttatttgaggatcgtgaaatgattgaggaacgcctcaaaacttatgcccacctgttcgacgataaggtgatgaagcagctgaaacgtcggcgctacacaggatggggccgcttgagtcgcaaacttattaacggaatccgtgacaagcaatccggcaaaacgattctggatttcttgaagtcggacggatttgctaatcgcaacttcatgcagttgatccatgatgactccctgacttttaaagaggatattcaaaaggcgcaggttagtggtcaaggcgacagcttacacgaacacatcgcaaatttggctggttcgccggccattaaaaaggggatcctccagaccgtgaaagttgtagatgagcttgttaaggtcatgggtcgtcataagcccgaaaacatcgtgattgaaatggcgcgggagaatcaaacgacccagaaaggacaaaagaatagccgtgaacggatgaagcggatcgaggaaggcattaaagagctggggtctcaaatcttgaaggaacaccctgtggagaacactcagctccaaaatgaaaaactttacctgtactatttgcagaacggacgcgatatgtacgtggaccaagagttggatattaatcggctgagtgactacgacgttgatcatatcgtcccgcagagcttcctcaaagacgattctattgacaataaggtactgacgcgctctgataaaaaccgtggtaagtcggacaacgtgccctccgaagaggttgtgaaaaagatgaaaaattattggcgccagcttttaaacgcgaagctgatcacacaacgtaaattcgataatttgaccaaggctgaacggggtggcctgagcgagttagataaggcaggatttattaaacgccagttagtggagactcgtcaaatcaccaaacatgtcgcgcagattttggacagccggatgaacaccaagtacgatgaaaatgacaaactgatccgtgaggtgaaagtcattactctgaagtccaaattagttagtgatttccggaaggactttcaattctacaaagtccgtgaaattaataactatcatcacgcacatgacgcgtacctgaatgcagtggttgggaccgcccttatcaagaaatatcctaagctggagtcggagtttgtctatggcgactataaggtatacgatgttcgcaaaatgattgcgaaatctgagcaggagatcggtaaggcaaccgcaaaatatttcttttactcaaacattatgaatttctttaagacagaaatcactctggccaacggggagattcgcaaacgtccgttgatcgaaacaaacggcgagactggcgaaattgtttgggacaaagggcgtgatttcgcgacggtgcgcaaggtactgagcatgcctcaagtcaatattgttaagaaaaccgaagtgcagacgggcgggttttccaaggaaagcatcttacccaaacgtaattcagataaacttattgcacgcaaaaaggactgggatccgaaaaagtatggaggcttcgacagtccaaccgtagcctactctgttctcgttgtagcgaaagtagaaaagggtaaatccaagaaactgaaatctgtcaaggagttgcttggaatcaccattatggagcgtagctccttcgagaagaacccgattgactttctggaagccaaaggatataaagaggtcaagaaagatcttatcattaagctgcctaagtattcactcttcgagctggaaaatggtcgtaaacgcatgctcgcttctgccggcgagttgcagaagggcaatgaattagcacttccatcaaagtacgttaacttcctgtatttggccagccattacgagaaactgaaggggtctccagaggacaacgaacagaaacaattatttgtagagcagcacaagcattatcttgatgaaatcattgagcaaatttccgaattcagtaaacgcgtaatcctggccgatgcaaacctcgacaaggtgctgagcgcttacaataagcatcgcgacaaacctatccgtgagcaggctgaaaatatcattcacctgttcacattaacgaacctgggcgctccggccgcttttaaatatttcgacacgacaatcgaccgtaagcgctataccagtacgaaagaagtgttggatgcgacccttattcaccagtcaattacaggattatatgagacccgtatcgaccttagccaattaggtggggatgcgccagcgcctgctcctgcacccgctccagctcctgccccagctccagcgcccgctcctgcacctgcgatggtgagcaaaggtgaagaggataatatggccatcatcaaagaattcatgcgcttcaaagttcatatggaaggtagcgttaatggccacgaatttgaaattgaaggtgaaggcgaaggtcgtccgtatgaaggcacccagaccgcaaaactgaaagttaccaaaggtggtccgctgccgtttgcatgggatattctgagtccgcagtttatgtatggtagcaaagcctatgttaaacatccggcagatatcccggattatctgaaactgagctttccggaaggttttaaatgggaacgtgtgatgaattttgaagatggtggtgttgttaccgttacacaggatagcagcctgcaggatggtgaatttatctataaagttaaactgcgtggcacgaattttccgagtgatggtccggttatgcagaaaaaaaccatgggttgggaagcaagcagcgaacgtatgtatccggaagatggcgcactgaaaggtgaaattaaacagcgtctgaagctgaaagatggcggtcattatgatgcagaagttaaaaccacctacaaagccaaaaaaccggttcagctgcctggtgcatataacgttaacattaaactggatatcaccagccacaacgaggattataccattgttgaacagtatgaacgtgcagaaggtcgccatagtaccggtggtatggatgaactgtataaa

SEQ ID NO: 385 - DNA, 4887 bp, synthetic construct
  misc_feature 1..4887: note = SYNTHETIC
  source 1..4887: mol_type = other DNA
atggacaaaaagtactctattggcctggatatcgggaccaacagcgtcgggtgggctgttatcaccgacgagtataaagtaccttcgaaaaagttcaaagtgctgggcaacaccgatcgccattcaatcaaaaagaacttgattggtgcgctgttgtttgactccggggaaaccgccgaggcgactcgccttaaacgtacagcacgtcgccggtacactcggcgtaagaatcgcatttgctatttgcaggaaatctttagcaacgagatggcaaaagtcgatgactcgtttttccaccgcctcgaggaaagctttctggtggaggaagacaaaaagcatgagcgtcacccgatcttcggcaacattgtcgatgaagtagcgtatcatgaaaaatacccaaccatttaccacttacgcaaaaagctggtggacagcactgacaaagctgatttgcgccttatctatttagccctggcacatatgattaagtttcgtggtcacttcctgatcgaaggagacttaaatcccgacaacagtgatgttgataaattgtttattcagcttgtccaaacttacaatcaactgttcgaggaaaacccgatcaatgcctccggtgtggatgcaaaagccattttaagtgcacgccttagcaagtcccgtcgcttagaaaaccttatcgcgcagctgcccggcgagaaaaagaatggtttgtttgggaaccttattgccttgagcttaggcctcaccccgaatttcaaaagtaatttcgatcttgcagaagacgccaaattacaactgtcgaaggatacttatgatgacgatctcgataatctgttagcgcagattggtgaccaatacgccgatctttttctggcggctaaaaatctgagcgacgccatcttgctttcggatattctccgcgttaacaccgaaatcacgaaagcgcctcttagtgccagcatgattaaacgttatgatgaacaccaccaggacctgaccttactcaaagcgttggttcgccagcaactgccagagaagtacaaagaaatcttctttgatcagtcaaagaatggttatgccggctatattgacgggggtgcaagccaagaggaattctacaaatttatcaagcctattctggagaaaatggatggcaccgaagagttattggtgaagcttaaccgtgaagacctcctgcggaaacagcgcacattcgataatggttcgatcccacaccaaatccatttgggggagttacacgctattttgcgtcgccaggaagacttttaccctttcctgaaggataaccgggagaaaattgagaagatccttacctttcgtattccgtattacgtaggccccttagcacggggtaatagccgtttcgcgtggatgacacggaagtcggaagagacgatcaccccgtggaacttcgaagaggtagtcgacaagggcgcatcagcgcagtcttttattgaacgtatgacgaatttcgataaaaacttgcccaatgagaaggtgcttccgaaacattccttgttatatgaatattttacagtttacaacgagctgaccaaggttaaatacgtgacggaaggaatgcgcaagcccgcttttcttagcggtgagcaaaaaaaggcgatcgtcgacctgttattcaaaacgaatcgtaaggtgactgtaaagcaactcaaagaagattacttcaaaaagattgagtgcttcgacagcgtcgaaatctctggggtagaggatcggtttaacgcaagtttaggtacctaccatgacctgcttaaaatcattaaggataaagacttcttagataatgaagagaacgaagatattctcgaggacatcgtcttgacgttaaccttatttgaggatcgtgaaatgattgaggaacgcctcaaaacttatgcccacctgttcgacgataaggtgatgaagcagctgaaacgtcggcgctacacaggatggggccgcttgagtcgcaaacttattaacggaatccgtgacaagcaatccggcaaaacgattctggatttcttgaagtcggacggatttgctaatcgcaacttcatgcagttgatccatgatgactccctgacttttaaagaggatattcaaaaggcgcaggttagtggtcaaggcgacagcttacacgaacacatcgcaaatttggctggttcgccggccattaaaaaggggatcctccagaccgtgaaagttgtagatgagcttgttaaggtcatgggtcgtcataagcccgaaaacatcgtgattgaaatggcgcgggagaatcaaacgacccagaaaggacaaaagaatagccgtgaacggatgaagcggatcgaggaaggcattaaagagctggggtctcaaatcttgaaggaacaccctgtggagaacactcagctccaaaatgaaaaactttacctgtactatttgcagaacggacgcgatatgtacgtggaccaagagttggatattaatcggctgagtgactacgacgttgatcatatcgtcccgcagagcttcctcaaagacgattctattgacaataaggtactgacgcgctctgataaaaaccgtggtaagtcggacaacgtgccctccgaagaggttgtgaaaaagatgaaaaattattggcgccagcttttaaacgcgaagctgatcacacaacgtaaattcgataatttgaccaaggctgaacggggtggcctgagcgagttagataaggcaggatttattaaacgccagttagtggagactcgtcaaatcaccaaacatgtcgcgcagattttggacagccggatgaacaccaagtacgatgaaaatgacaaactgatccgtgaggtgaaagtcattactctgaagtccaaattagttagtgatttccggaaggactttcaattctacaaagtccgtgaaattaataactatcatcacgcacatgacgcgtacctgaatgcagtggttgggaccgcccttatcaagaaatatcctaagctggagtcggagtttgtctatggcgactataaggtatacgatgttcgcaaaatgattgcgaaatctgagcaggagatcggtaaggcaaccgcaaaatatttcttttactcaaacattatgaatttctttaagacagaaatcactctggccaacggggagattcgcaaacgtccgttgatcgaaacaaacggcgagactggcgaaattgtttgggacaaagggcgtgatttcgcgacggtgcgcaaggtactgagcatgcctcaagtcaatattgttaagaaaaccgaagtgcagacgggcgggttttccaaggaaagcatcttacccaaacgtaattcagataaacttattgcacgcaaaaaggactgggatccgaaaaagtatggaggcttcgacagtccaaccgtagcctactctgttctcgttgtagcgaaagtagaaaagggtaaatccaagaaactgaaatctgtcaaggagttgcttggaatcaccattatggagcgtagctccttcgagaagaacccgattgactttctggaagccaaaggatataaagaggtcaagaaagatcttatcattaagctgcctaagtattcactcttcgagctggaaaatggtcgtaaacgcatgctcgcttctgccggcgagttgcagaagggcaatgaattagcacttccatcaaagtacgttaacttcctgtatttggccagccattacgagaaactgaaggggtctccagaggacaacgaacagaaacaattatttgtagagcagcacaagcattatcttgatgaaatcattgagcaaatttccgaattcagtaaacgcgtaatcctggccgatgcaaacctcgacaaggtgctgagcgcttacaataagcatcgcgacaaacctatccgtgagcaggctgaaaatatcattcacctgttcacattaacgaacctgggcgctccggccgcttttaaatatttcgacacgacaatcgaccgtaagcgctataccagtacgaaagaagtgttggatgcgacccttattcaccagtcaattacaggattatatgagacccgtatcgaccttagccaattaggtggggatgcgccagcgcctgctcctgcacccgctccagctcctgccccagctccagcgcccgctcctgctcctgcacctgcgatggtgagcaaaggtgaagaggataatatggccatcatcaaagaattcatgcgcttcaaagttcatatggaaggtagcgttaatggccacgaatttgaaattgaaggtgaaggcgaaggtcgtccgtatgaaggcacccagaccgcaaaactgaaagttaccaaaggtggtccgctgccgtttgcatgggatattctgagtccgcagtttatgtatggtagcaaagcctatgttaaacatccggcagatatcccggattatctgaaactgagctttccggaaggttttaaatgggaacgtgtgatgaattttgaagatggtggtgttgttaccgttacacaggatagcagcctgcaggatggtgaatttatctataaagttaaactgcgtggcacgaattttccgagtgatggtccggttatgcagaaaaaaaccatgggttgggaagcaagcagcgaacgtatgtatccggaagatggcgcactgaaaggtgaaattaaacagcgtctgaagctgaaagatggcggtcattatgatgcagaagttaaaaccacctacaaagccaaaaaaccggttcagctgcctggtgcatataacgttaacattaaactggatatcaccagccacaacgaggattataccattgttgaacagtatgaacgtgcagaaggtcgccatagtaccggtggtatggatgaactgtataaa

SEQ ID NO: 386 - DNA, 4893 bp, synthetic construct
  misc_feature 1..4893: note = SYNTHETIC
  source 1..4893: mol_type = other DNA
atggacaaaaagtactctattggcctggatatcgggaccaacagcgtcgggtgggctgttatcaccgacgagtataaagtaccttcgaaaaagttcaaagtgctgggcaacaccgatcgccattcaatcaaaaagaacttgattggtgcgctgttgtttgactccggggaaaccgccgaggcgactcgccttaaacgtacagcacgtcgccggtacactcggcgtaagaatcgcatttgctatttgcaggaaatctttagcaacgagatggcaaaagtcgatgactcgtttttccaccgcctcgaggaaagctttctggtggaggaagacaaaaagcatgagcgtcacccgatcttcggcaacattgtcgatgaagtagcgtatcatgaaaaatacccaaccatttaccacttacgcaaaaagctggtggacagcactgacaaagctgatttgcgccttatctatttagccctggcacatatgattaagtttcgtggtcacttcctgatcgaaggagacttaaatcccgacaacagtgatgttgataaattgtttattcagcttgtccaaacttacaatcaactgttcgaggaaaacccgatcaatgcctccggtgtggatgcaaaagccattttaagtgcacgccttagcaagtcccgtcgcttagaaaaccttatcgcgcagctgcccggcgagaaaaagaatggtttgtttgggaaccttattgccttgagcttaggcctcaccccgaatttcaaaagtaatttcgatcttgcagaagacgccaaattacaactgtcgaaggatacttatgatgacgatctcgataatctgttagcgcagattggtgaccaatacgccgatctttttctggcggctaaaaatctgagcgacgccatcttgctttcggatattctccgcgttaacaccgaaatcacgaaagcgcctcttagtgccagcatgattaaacgttatgatgaacaccaccaggacctgaccttactcaaagcgttggttcgccagcaactgccagagaagtacaaagaaatcttctttgatcagtcaaagaatggttatgccggctatattgacgggggtgcaagccaagaggaattctacaaatttatcaagcctattctggagaaaatggatggcaccgaagagttattggtgaagcttaaccgtgaagacctcctgcggaaacagcgcacattcgataatggttcgatcccacaccaaatccatttgggggagttacacgctattttgcgtcgccaggaagacttttaccctttcctgaaggataaccgggagaaaattgagaagatccttacctttcgtattccgtattacgtaggccccttagcacggggtaatagccgtttcgcgtggatgacacggaagtcggaagagacgatcaccccgtggaacttcgaagaggtagtcgacaagggcgcatcagcgcagtcttttattgaacgtatgacgaatttcgataaaaacttgcccaatgagaaggtgcttccgaaacattccttgttatatgaatattttacagtttacaacgagctgaccaaggttaaatacgtgacggaaggaatgcgcaagcccgcttttcttagcggtgagcaaaaaaaggcgatcgtcgacctgttattcaaaacgaatcgtaaggtgactgtaaagcaactcaaagaagattacttcaaaaagattgagtgcttcgacagcgtcgaaatctctggggtagaggatcggtttaacgcaagtttaggtacctaccatgacctgcttaaaatcattaaggataaagacttcttagataatgaagagaacgaagatattctcgaggacatcgtcttgacgttaaccttatttgaggatcgtgaaatgattgaggaacgcctcaaaacttatgcccacctgttcgacgataaggtgatgaagcagctgaaacgtcggcgctacacaggatggggccgcttgagtcgcaaacttattaacggaatccgtgacaagcaatccggcaaaacgattctggatttcttgaagtcggacggatttgctaatcgcaacttcatgcagttgatccatgatgactccctgacttttaaagaggatattcaaaaggcgcaggttagtggtcaaggcgacagcttacacgaacacatcgcaaatttggctggttcgccggccattaaaaaggggatcctccagaccgtgaaagttgtagatgagcttgttaaggtcatgggtcgtcataagcccgaaaacatcgtgattgaaatggcgcgggagaatcaaacgacccagaaaggacaaaagaatagccgtgaacggatgaagcggatcgaggaaggcattaaagagctggggtctcaaatcttgaaggaacaccctgtggagaacactcagctccaaaatgaaaaactttacctgtactatttgcagaacggacgcgatatgtacgtggaccaagagttggatattaatcggctgagtgactacgacgttgatcatatcgtcccgcagagcttcctcaaagacgattctattgacaataaggtactgacgcgctctgataaaaaccgtggtaagtcggacaacgtgccctccgaagaggttgtgaaaaagatgaaaaattattggcgccagcttttaaacgcgaagctgatcacacaacgtaaattcgataatttgaccaaggctgaacggggtggcctgagcgagttagataaggcaggatttattaaacgccagttagtggagactcgtcaaatcaccaaacatgtcgcgcagattttggacagccggatgaacaccaagtacgatgaaaatgacaaactgatccgtgaggtgaaagtcattactctgaagtccaaattagttagtgatttccggaaggactttcaattctacaaagtccgtgaaattaataactatcatcacgcacatgacgcgtacctgaatgcagtggttgggaccgcccttatcaagaaatatcctaagctggagtcggagtttgtctatggcgactataaggtatacgatgttcgcaaaatgattgcgaaatctgagcaggagatcggtaaggcaaccgcaaaatatttcttttactcaaacattatgaatttctttaagacagaaatcactctggccaacggggagattcgcaaacgtccgttgatcgaaacaaacggcgagactggcgaaattgtttgggacaaagggcgtgatttcgcgacggtgcgcaaggtactgagcatgcctcaagtcaatattgttaagaaaaccgaagtgcagacgggcgggttttccaaggaaagcatcttacccaaacgtaattcagataaacttattgcacgcaaaaaggactgggatccgaaaaagtatggaggcttcgacagtccaaccgtagcctactctgttctcgttgtagcgaaagtagaaaagggtaaatccaagaaactgaaatctgtcaaggagttgcttggaatcaccattatggagcgtagctccttcgagaagaacccgattgactttctggaagccaaaggatataaagaggtcaagaaagatcttatcattaagctgcctaagtattcactcttcgagctggaaaatggtcgtaaacgcatgctcgcttctgccggcgagttgcagaagggcaatgaattagcacttccatcaaagtacgttaacttcctgtatttggccagccattacgagaaactgaaggggtctccagaggacaacgaacagaaacaattatttgtagagcagcacaagcattatcttgatgaaatcattgagcaaatttccgaattcagtaaacgcgtaatcctggccgatgcaaacctcgacaaggtgctgagcgcttacaataagcatcgcgacaaacctatccgtgagcaggctgaaaatatcattcacctgttcacattaacgaacctgggcgctccggccgcttttaaatatttcgacacgacaatcgaccgtaagcgctataccagtacgaaagaagtgttggatgcgacccttattcaccagtcaattacaggattatatgagacccgtatcgaccttagccaattaggtggggatgcgccagcgcctgctcctgcacccgctccagctcctgccccagctccagcgcccgctcctgcgccagctcctgcacctgcgatggtgagcaaaggtgaagaggataatatggccatcatcaaagaattcatgcgcttcaaagttcatatggaaggtagcgttaatggccacgaatttgaaattgaaggtgaaggcgaaggtcgtccgtatgaaggcacccagaccgcaaaactgaaagttaccaaaggtggtccgctgccgtttgcatgggatattctgagtccgcagtttatgtatggtagcaaagcctatgttaaacatccggcagatatcccggattatctgaaactgagctttccggaaggttttaaatgggaacgtgtgatgaattttgaagatggtggtgttgttaccgttacacaggatagcagcctgcaggatggtgaatttatctataaagttaaactgcgtggcacgaattttccgagtgatggtccggttatgcagaaaaaaaccatgggttgggaagcaagcagcgaacgtatgtatccggaagatggcgcactgaaaggtgaaattaaacagcgtctgaagctgaaagatggcggtcattatgatgcagaagttaaaaccacctacaaagccaaaaaaccggttcagctgcctggtgcatataacgttaacattaaactggatatcaccagccacaacgaggattataccattgttgaacagtatgaacgtgcagaaggtcgccatagtaccggtggtatggatgaactgtataaa

SEQ ID NO: 387 - DNA, 4899 bp, synthetic construct
  misc_feature 1..4899: note = SYNTHETIC
  source 1..4899: mol_type = other DNA
atggacaaaaagtactctattggcctggatatcgggaccaacagcgtcgggtgggctgttatcaccgacgagtataaagtaccttcgaaaaagttcaaagtgctgggcaacaccgatcgccattcaatcaaaaagaacttgattggtgcgctgttgtttgactccggggaaaccgccgaggcgactcgccttaaacgtacagcacgtcgccggtacactcggcgtaagaatcgcatttgctatttgcaggaaatctttagcaacgagatggcaaaagtcgatgactcgtttttccaccgcctcgaggaaagctttctggtggaggaagacaaaaagcatgagcgtcacccgatcttcggcaacattgtcgatgaagtagcgtatcatgaaaaatacccaaccatttaccacttacgcaaaaagctggtggacagcactgacaaagctgatttgcgccttatctatttagccctggcacatatgattaagtttcgtggtcacttcctgatcgaaggagacttaaatcccgacaacagtgatgttgataaattgtttattcagcttgtccaaacttacaatcaactgttcgaggaaaacccgatcaatgcctccggtgtggatgcaaaagccattttaagtgcacgccttagcaagtcccgtcgcttagaaaaccttatcgcgcagctgcccggcgagaaaaagaatggtttgtttgggaaccttattgccttgagcttaggcctcaccccgaatttcaaaagtaatttcgatcttgcagaagacgccaaattacaactgtcgaaggatacttatgatgacgatctcgataatctgttagcgcagattggtgaccaatacgccgatctttttctggcggctaaaaatctgagcgacgccatcttgctttcggatattctccgcgttaacaccgaaatcacgaaagcgcctcttagtgccagcatgattaaacgttatgatgaacaccaccaggacctgaccttactcaaagcgttggttcgccagcaactgccagagaagtacaaagaaatcttctttgatcagtcaaagaatggttatgccggctatattgacgggggtgcaagccaagaggaattctacaaatttatcaagcctattctggagaaaatggatggcaccgaagagttattggtgaagcttaaccgtgaagacctcctgcggaaacagcgcacattcgataatggttcgatcccacaccaaatccatttgggggagttacacgctattttgcgtcgccaggaagacttttaccctttcctgaaggataaccgggagaaaattgagaagatccttacctttcgtattccgtattacgtaggccccttagcacggggtaatagccgtttcgcgtggatgacacggaagtcggaagagacgatcaccccgtggaacttcgaagaggtagtcgacaagggcgcatcagcgcagtcttttattgaacgtatgacgaatttcgataaaaacttgcccaatgagaaggtgcttccgaaacattccttgttatatgaatattttacagtttacaacgagctgaccaaggttaaatacgtgacggaaggaatgcgcaagcccgcttttcttagcggtgagcaaaaaaaggcgatcgtcgacctgttattcaaaacgaatcgtaaggtgactgtaaagcaactcaaagaagattacttcaaaaagattgagtgcttcgacagcgtcgaaatctctggggtagaggatcggtttaacgcaagtttaggtacctaccatgacctgcttaaaatcattaaggataaagacttcttagataatgaagagaacgaagatattctcgaggacatcgtcttgacgttaaccttatttgaggatcgtgaaatgattgaggaacgcctcaaaacttatgcccacctgttcgacgataaggtgatgaagcagctgaaacgtcggcgctacacaggatggggccgcttgagtcgcaaacttattaacggaatccgtgacaagcaatccggcaaaacgattctggatttcttgaagtcggacggatttgctaatcgcaacttcatgcagttgatccatgatgactccctgacttttaaagaggatattcaaaaggcgcaggttagtggtcaaggcgacagcttacacgaacacatcgcaaatttggctggttcgccggccattaaaaaggggatcctccagaccgtgaaagttgtagatgagcttgttaaggtcatgggtcgtcataagcccgaaaacatcgtgattgaaatggcgcgggagaatcaaacgacccagaaaggacaaaagaatagccgtgaacggatgaagcggatcgaggaaggcattaaagagctggggtctcaaatcttgaaggaacaccctgtggagaacactcagctccaaaatgaaaaactttacctgtactatttgcagaacggacgcgatatgtacgtggaccaagagttggatattaatcggctgagtgactacgacgttgatcatatcgtcccgcagagcttcctcaaagacgattctattgacaataaggtactgacgcgctctgataaaaaccgtggtaagtcggacaacgtgccctccgaagaggttgtgaaaaagatgaaaaattattggcgccagcttttaaacgcgaagctgatcacacaacgtaaattcgataatttgaccaaggctgaacggggtggcctgagcgagttagataaggcaggatttattaaacgccagttagtggagactcgtcaaatcaccaaacatgtcgcgcagattttggacagccggatgaacaccaagtacgatgaaaatgacaaactgatccgtgaggtgaaagtcattactctgaagtccaaattagttagtgatttccggaaggactttcaattctacaaagtccgtgaaattaataactatcatcacgcacatgacgcgtacctgaatgcagtggttgggaccgcccttatcaagaaatatcctaagctggagtcggagtttgtctatggcgactataaggtatacgatgttcgcaaaatgattgcgaaatctgagcaggagatcggtaaggcaaccgcaaaatatttcttttactcaaacattatgaatttctttaagacagaaatcactctggccaacggggagattcgcaaacgtccgttgatcgaaacaaacggcgagactggcgaaattgtttgggacaaagggcgtgatttcgcgacggtgcgcaaggtactgagcatgcctcaagtcaatattgttaagaaaaccgaagtgcagacgggcgggttttccaaggaaagcatcttacccaaacgtaattcagataaacttattgcacgcaaaaaggactgggatccgaaaaagtatggaggcttcgacagtccaaccgtagcctactctgttctcgttgtagcgaaagtagaaaagggtaaatccaagaaactgaaatctgtcaaggagttgcttggaatcaccattatggagcgtagctccttcgagaagaacccgattgactttctggaagccaaaggatataaagaggtcaagaaagatcttatcattaagctgcctaagtattcactcttcgagctggaaaatggtcgtaaacgcatgctcgcttctgccggcgagttgcagaagggcaatgaattagcacttccatcaaagtacgttaacttcctgtatttggccagccattacgagaaactgaaggggtctccagaggacaacgaacagaaacaattatttgtagagcagcacaagcattatcttgatgaaatcattgagcaaatttccgaattcagtaaacgcgtaatcctggccgatgcaaacctcgacaaggtgctgagcgcttacaataagcatcgcgacaaacctatccgtgagcaggctgaaaatatcattcacctgttcacattaacgaacctgggcgctccggccgcttttaaatatttcgacacgacaatcgaccgtaagcgctataccagtacgaaagaagtgttggatgcgacccttattcaccagtcaattacaggattatatgagacccgtatcgaccttagccaattaggtggggatgcgccagcgcctgctcctgcacccgctccagctcctgccccagctccagcgcccgctcctgcgccagctcctgcacctgctccagcgatggtgagcaaaggtgaagaggataatatggccatcatcaaagaattcatgcgcttcaaagttcatatggaaggtagcgttaatggccacgaatttgaaattgaaggtgaaggcgaaggtcgtccgtatgaaggcacccagaccgcaaaactgaaagttaccaaaggtggtccgctgccgtttgcatgggatattctgagtccgcagtttatgtatggtagcaaagcctatgttaaacatccggcagatatcccggattatctgaaactgagctttccggaaggttttaaatgggaacgtgtgatgaattttgaagatggtggtgttgttaccgttacacaggatagcagcctgcaggatggtgaatttatctataaagttaaactgcgtggcacgaattttccgagtgatggtccggttatgcagaaaaaaaccatgggttgggaagcaagcagcgaacgtatgtatccggaagatggcgcactgaaaggtgaaattaaacagcgtctgaagctgaaagatggcggtcattatgatgcagaagttaaaaccacctacaaagccaaaaaaccggttcagctgcctggtgcatataacgttaacattaaactggatatcaccagccacaacgaggattataccattgttgaacagtatgaacgtgcagaaggtcgccatagtaccggtggtatggatgaactgtataaa

SEQ ID NO: 388 - DNA, 4410 bp, synthetic construct
  misc_feature 1..4401: note = SYNTHETIC
  source 1..4410: mol_type = other DNA
atgagcaaactggaaaagttcaccaactgttatagcctgagcaaaaccctgcgttttaaagcaattccggttggtaaaacccaagagaacattgataataaacgcctgctggtcgaagatgaaaaacgcgctgaagattataaaggcgtgaaaaaactgctggatcgctattatctgagcttcattaacgatgtgctgcacagcattaaactgaagaacctgaacaactatatcagcctgtttcgtaaaaaaacccgcaccgaaaaagaaaacaaagagctggaaaacctggaaatcaatctgcgtaaagaaatcgccaaagcgtttaaaggtaacgagggttataaaagcctgttcaagaaagacatcatcgaaaccattctgccggaatttctggatgataaagatgaaattgccctggtgaatagctttaatggctttaccaccgcatttaccggcttttttgataatcgcgaaaacatgttcagcgaagaagcaaaaagcaccagcattgcatttcgctgcattaatgaaaatctgacccgctacattagcaacatggatatctttgaaaaagtggacgcgatcttcgataaacacgaagtgcaagagatcaaagagaaaatcctgaacagcgattatgacgtcgaagatttttttgaaggcgagttctttaacttcgttctgacccaagaaggtatcgacgtttataacgcaattattggtggttttgttaccgaaagcggtgagaaaatcaaaggcctgaatgaatatatcaacctgtataaccagaaaaccaaacagaaactgccgaaattcaaaccgctgtataaacaggttctgagcgatcgtgaaagcctgagcttttatggtgaaggttataccagtgatgaagaggttctggaagtttttcgtaacaccctgaataaaaacagcgagatctttagcagcatcaaaaagcttgagaaactgttcaaaaactttgatgagtatagcagcgcaggcatctttgttaaaaatggtccggcaattagcaccatcagcaaagatatttttggcgaatggaatgtgatccgcgataaatggaatgccgaatatgatgatatccacctgaaaaaaaaggccgtggtgaccgagaaatatgaagatgatcgtcgtaaaagcttcaagaaaattggtagctttagcctggaacagctgcaagaatatgcagatgcagatctgagcgttgtggaaaaactgaaagaaatcatcattcagaaggtggacgagatctataaagtttatggtagcagcgaaaaactgttcgatgcagattttgttctggaaaaaagcctgaaaaagaatgatgccgttgtggccattatgaaagatctgctggatagcgttaagagcttcgagaattacatcaaagccttttttggtgagggcaaagaaaccaatcgtgatgaaagtttctatggcgattttgtgctggcctatgatattctgctgaaagtggaccatatttatgatgccattcgcaattatgttacccagaaaccgtatagcaaagacaagttcaaactgtactttcagaacccgcagtttatgggtggttgggataaagataaagaaaccgattatcgtgccaccatcctgcgttatggtagtaaatactatctggccatcatggacaaaaaatacgcaaaatgcctgcagaaaatcgacaaagatgatgtgaatggcaactatgaaaaaatcaactacaaactgctgcctggtccgaataaaatgctgccgaaagtgttctttagcaagaaatggatggcctattataacccgagcgaggatattcaaaagatctacaaaaatggcacctttaaaaagggcgacatgttcaatctgaacgattgccacaaactgatcgatttcttcaaagattcaatttcgcgttatccgaaatggtccaatgcctatgattttaactttagcgaaaccgaaaaatacaaagacattgccggtttttatcgcgaagtggaagaacagggctataaagtgagctttgaaagcgcaagcaaaaaagaggttgataagctggttgaagagggcaaactgtatatgttccagatttacaacaaagattttagcgacaaaagccatggcaccccgaatctgcataccatgtactttaaactgctgttcgacgaaaataaccatggtcagattcgtctgagcggtggtgccgaactgtttatgcgtcgtgcaagtctgaaaaaagaagaactggttgttcatccggcaaatagcccgattgcaaacaaaaatccggacaatccgaaaaaaaccacgacactgagctatgatgtgtataaagacaaacgttttagcgaggatcagtatctgctgcatatcccgattgccatcaataaatgcccgaaaaacatctttaagatcaacaccgaagttcgcgtgctgctgaaacatgatgataatccgtatgtgattggcattgatcgtggtgaacgtaacctgctgtatattgttgttgttgatggtaaaggcaacatcgtggaacagtatagtctgaacgaaattatcaacaactttaacggcatccgcatcaaaaccgactatcatagcctgctggacaagaaagaaaaagaacgttttgaagcacgtcagaactggaccagtattgaaaacatcaaagaactgaaagccggttatattagccaggtggttcataaaatctgtgagctggtagaaaaatacgatgcagttattgcactggaagatctgaatagcggtttcaaaaatagccgtgtgaaagtcgaaaaacaggtgtatcagaaattcgagaaaatgctgatcgacaaactgaactacatggtcgacaaaaaaagcaatccgtgtgcaaccggtggtgcactgaaaggttatcagattaccaacaaatttgaaagctttaaaagcatgagcacccagaacggctttatcttctatattccggcatggctgaccagcaaaattgatccgagcaccggttttgtgaacctgctgaaaacaaaatatacctccattgccgacagcaagaagtttattagcagctttgatcgcattatgtatgttccggaagaggacctgtttgaattcgcactggattacaaaaatttcagccgtaccgatgccgactacatcaaaaaatggaaactgtacagctatggtaaccgcattcgcatttttcgcaacccgaagaaaaacaatgtgttcgattgggaagaagtttgtctgaccagcgcatataaagaacttttcaacaaatacggcatcaactatcagcagggtgatattcgtgcactgctgtgtgaacagagcgataaagcgttttatagcagttttatggcactgatgagcctgatgctgcagatgcgtaatagcattaccggtcgcaccgatgtggattttctgattagtccggtgaaaaattccgatggcatcttttatgatagccgcaattacgaagcacaagaaaatgcaattctgccgaaaaacgcagatgcaaatggtgcatataacattgcacgtaaagttctgtgggcaattggccagtttaagaaagcagaagatgagaagctggacaaagtgaaaattgcgatcagcaataaagagtggctggaatacgcacagaccagcgttaaacatgcacctgcgatggttagcaaaggtgaagaactgtttaccggcgttgtgccgattctggtggaactggatggtgatgtgaatggccataaatttagcgttagcggcgaaggcgaaggtgatgcgacctatggtaaactgaccctgaaatttatttgcaccaccggtaaactgccggttccgtggccgaccctggtgaccaccctgacctatggcgttcagtgctttagccgctatccggatcatatgaaacagcatgatttctttaaaagcgcgatgccggaaggctatgtgcaggaacgtaccatttttttcaaagatgatggcaactataaaacccgtgcggaagttaaatttgaaggcgataccctggtgaaccgcattgaactgaaaggtattgattttaaagaagatggcaacattctgggtcataaactggaatataattacaacagccataatgtgtatattatggccgataaacagaaaaatggcatcaaagtgaactttaaaatccgtcacaacattgaagatggtagcgtgcagctggcggatcattatcagcagaataccccgattggtgatggcccggtgctgctgccggataatcattatctgagcacccagagcgcgctgagcaaagatccgaatgaaaaacgtgatcatatggtgctgctggaatttgttaccgccgcgggcattaccctgggtatggatgaactgtataaa

SEQ ID NO: 389 - DNA, 4437 bp, synthetic construct
  misc_feature 1..4437: note = SYNTHETIC
  source 1..4437: mol_type = other DNA
atgagcaaactggaaaagttcaccaactgttatagcctgagcaaaaccctgcgttttaaagcaattccggttggtaaaacccaagagaacattgataataaacgcctgctggtcgaagatgaaaaacgcgctgaagattataaaggcgtgaaaaaactgctggatcgctattatctgagcttcattaacgatgtgctgcacagcattaaactgaagaacctgaacaactatatcagcctgtttcgtaaaaaaacccgcaccgaaaaagaaaacaaagagctggaaaacctggaaatcaatctgcgtaaagaaatcgccaaagcgtttaaaggtaacgagggttataaaagcctgttcaagaaagacatcatcgaaaccattctgccggaatttctggatgataaagatgaaattgccctggtgaatagctttaatggctttaccaccgcatttaccggcttttttgataatcgcgaaaacatgttcagcgaagaagcaaaaagcaccagcattgcatttcgctgcattaatgaaaatctgacccgctacattagcaacatggatatctttgaaaaagtggacgcgatcttcgataaacacgaagtgcaagagatcaaagagaaaatcctgaacagcgattatgacgtcgaagatttttttgaaggcgagttctttaacttcgttctgacccaagaaggtatcgacgtttataacgcaattattggtggttttgttaccgaaagcggtgagaaaatcaaaggcctgaatgaatatatcaacctgtataaccagaaaaccaaacagaaactgccgaaattcaaaccgctgtataaacaggttctgagcgatcgtgaaagcctgagcttttatggtgaaggttataccagtgatgaagaggttctggaagtttttcgtaacaccctgaataaaaacagcgagatctttagcagcatcaaaaagcttgagaaactgttcaaaaactttgatgagtatagcagcgcaggcatctttgttaaaaatggtccggcaattagcaccatcagcaaagatatttttggcgaatggaatgtgatccgcgataaatggaatgccgaatatgatgatatccacctgaaaaaaaaggccgtggtgaccgagaaatatgaagatgatcgtcgtaaaagcttcaagaaaattggtagctttagcctggaacagctgcaagaatatgcagatgcagatctgagcgttgtggaaaaactgaaagaaatcatcattcagaaggtggacgagatctataaagtttatggtagcagcgaaaaactgttcgatgcagattttgttctggaaaaaagcctgaaaaagaatgatgccgttgtggccattatgaaagatctgctggatagcgttaagagcttcgagaattacatcaaagccttttttggtgagggcaaagaaaccaatcgtgatgaaagtttctatggcgattttgtgctggcctatgatattctgctgaaagtggaccatatttatgatgccattcgcaattatgttacccagaaaccgtatagcaaagacaagttcaaactgtactttcagaacccgcagtttatgggtggttgggataaagataaagaaaccgattatcgtgccaccatcctgcgttatggtagtaaatactatctggccatcatggacaaaaaatacgcaaaatgcctgcagaaaatcgacaaagatgatgtgaatggcaactatgaaaaaatcaactacaaactgctgcctggtccgaataaaatgctgccgaaagtgttctttagcaagaaatggatggcctattataacccgagcgaggatattcaaaagatctacaaaaatggcacctttaaaaagggcgacatgttcaatctgaacgattgccacaaactgatcgatttcttcaaagattcaatttcgcgttatccgaaatggtccaatgcctatgattttaactttagcgaaaccgaaaaatacaaagacattgccggtttttatcgcgaagtggaagaacagggctataaagtgagctttgaaagcgcaagcaaaaaagaggttgataagctggttgaagagggcaaactgtatatgttccagatttacaacaaagattttagcgacaaaagccatggcaccccgaatctgcataccatgtactttaaactgctgttcgacgaaaataaccatggtcagattcgtctgagcggtggtgccgaactgtttatgcgtcgtgcaagtctgaaaaaagaagaactggttgttcatccggcaaatagcccgattgcaaacaaaaatccggacaatccgaaaaaaaccacgacactgagctatgatgtgtataaagacaaacgttttagcgaggatcagtatctgctgcatatcccgattgccatcaataaatgcccgaaaaacatctttaagatcaacaccgaagttcgcgtgctgctgaaacatgatgataatccgtatgtgattggcattgatcgtggtgaacgtaacctgctgtatattgttgttgttgatggtaaaggcaacatcgtggaacagtatagtctgaacgaaattatcaacaactttaacggcatccgcatcaaaaccgactatcatagcctgctggacaagaaagaaaaagaacgttttgaagcacgtcagaactggaccagtattgaaaacatcaaagaactgaaagccggttatattagccaggtggttcataaaatctgtgagctggtagaaaaatacgatgcagttattgcactggaagatctgaatagcggtttcaaaaatagccgtgtgaaagtcgaaaaacaggtgtatcagaaattcgagaaaatgctgatcgacaaactgaactacatggtcgacaaaaaaagcaatccgtgtgcaaccggtggtgcactgaaaggttatcagattaccaacaaatttgaaagctttaaaagcatgagcacccagaacggctttatcttctatattccggcatggctgaccagcaaaattgatccgagcaccggttttgtgaacctgctgaaaacaaaatatacctccattgccgacagcaagaagtttattagcagctttgatcgcattatgtatgttccggaagaggacctgtttgaattcgcactggattacaaaaatttcagccgtaccgatgccgactacatcaaaaaatggaaactgtacagctatggtaaccgcattcgcatttttcgcaacccgaagaaaaacaatgtgttcgattgggaagaagtttgtctgaccagcgcatataaagaacttttcaacaaatacggcatcaactatcagcagggtgatattcgtgcactgctgtgtgaacagagcgataaagcgttttatagcagttttatggcactgatgagcctgatgctgcagatgcgtaatagcattaccggtcgcaccgatgtggattttctgattagtccggtgaaaaattccgatggcatcttttatgatagccgcaattacgaagcacaagaaaatgcaattctgccgaaaaacgcagatgcaaatggtgcatataacattgcacgtaaagttctgtgggcaattggccagtttaagaaagcagaagatgagaagctggacaaagtgaaaattgcgatcagcaataaagagtggctggaatacgcacagaccagcgttaaacatggtagcgcaggtagtgcagcaggtagcggtgaatttatggttagcaaaggtgaagaactgtttaccggcgttgtgccgattctggtggaactggatggtgatgtgaatggccataaatttagcgttagcggcgaaggcgaaggtgatgcgacctatggtaaactgaccctgaaatttatttgcaccaccggtaaactgccggttccgtggccgaccctggtgaccaccctgacctatggcgttcagtgctttagccgctatccggatcatatgaaacagcatgatttctttaaaagcgcgatgccggaaggctatgtgcaggaacgtaccatttttttcaaagatgatggcaactataaaacccgtgcggaagttaaatttgaaggcgataccctggtgaaccgcattgaactgaaaggtattgattttaaagaagatggcaacattctgggtcataaactggaatataattacaacagccataatgtgtatattatggccgataaacagaaaaatggcatcaaagtgaactttaaaatccgtcacaacattgaagatggtagcgtgcagctggcggatcattatcagcagaataccccgattggtgatggcccggtgctgctgccggataatcattatctgagcacccagagcgcgctgagcaaagatccgaatgaaaaacgtgatcatatggtgctgctggaatttgttaccgccgcgggcattaccctgggtatggatgaactgtataaa

SEQ ID NO: 390 - DNA, 4461 bp, synthetic construct
  misc_feature 1..4461: note = SYNTHETIC
  source 1..4461: mol_type = other DNA
atgagcaaactggaaaagttcaccaactgttatagcctgagcaaaaccctgcgttttaaagcaattccggttggtaaaacccaagagaacattgataataaacgcctgctggtcgaagatgaaaaacgcgctgaagattataaaggcgtgaaaaaactgctggatcgctattatctgagcttcattaacgatgtgctgcacagcattaaactgaagaacctgaacaactatatcagcctgtttcgtaaaaaaacccgcaccgaaaaagaaaacaaagagctggaaaacctggaaatcaatctgcgtaaagaaatcgccaaagcgtttaaaggtaacgagggttataaaagcctgttcaagaaagacatcatcgaaaccattctgccggaatttctggatgataaagatgaaattgccctggtgaatagctttaatggctttaccaccgcatttaccggcttttttgataatcgcgaaaacatgttcagcgaagaagcaaaaagcaccagcattgcatttcgctgcattaatgaaaatctgacccgctacattagcaacatggatatctttgaaaaagtggacgcgatcttcgataaacacgaagtgcaagagatcaaagagaaaatcctgaacagcgattatgacgtcgaagatttttttgaaggcgagttctttaacttcgttctgacccaagaaggtatcgacgtttataacgcaattattggtggttttgttaccgaaagcggtgagaaaatcaaaggcctgaatgaatatatcaacctgtataaccagaaaaccaaacagaaactgccgaaattcaaaccgctgtataaacaggttctgagcgatcgtgaaagcctgagcttttatggtgaaggttataccagtgatgaagaggttctggaagtttttcgtaacaccctgaataaaaacagcgagatctttagcagcatcaaaaagcttgagaaactgttcaaaaactttgatgagtatagcagcgcaggcatctttgttaaaaatggtccggcaattagcaccatcagcaaagatatttttggcgaatggaatgtgatccgcgataaatggaatgccgaatatgatgatatccacctgaaaaaaaaggccgtggtgaccgagaaatatgaagatgatcgtcgtaaaagcttcaagaaaattggtagctttagcctggaacagctgcaagaatatgcagatgcagatctgagcgttgtggaaaaactgaaagaaatcatcattcagaaggtggacgagatctataaagtttatggtagcagcgaaaaactgttcgatgcagattttgttctggaaaaaagcctgaaaaagaatgatgccgttgtggccattatgaaagatctgctggatagcgttaagagcttcgagaattacatcaaagccttttttggtgagggcaaagaaaccaatcgtgatgaaagtttctatggcgattttgtgctggcctatgatattctgctgaaagtggaccatatttatgatgccattcgcaattatgttacccagaaaccgtatagcaaagacaagttcaaactgtactttcagaacccgcagtttatgggtggttgggataaagataaagaaaccgattatcgtgccaccatcctgcgttatggtagtaaatactatctggccatcatggacaaaaaatacgcaaaatgcctgcagaaaatcgacaaagatgatgtgaatggcaactatgaaaaaatcaactacaaactgctgcctggtccgaataaaatgctgccgaaagtgttctttagcaagaaatggatggcctattataacccgagcgaggatattcaaaagatctacaaaaatggcacctttaaaaagggcgacatgttcaatctgaacgattgccacaaactgatcgatttcttcaaagattcaatttcgcgttatccgaaatggtccaatgcctatgattttaactttagcgaaaccgaaaaatacaaagacattgccggtttttatcgcgaagtggaagaacagggctataaagtgagctttgaaagcgcaagcaaaaaagaggttgataagctggttgaagagggcaaactgtatatgttccagatttacaacaaagattttagcgacaaaagccatggcaccccgaatctgcataccatgtactttaaactgctgttcgacgaaaataaccatggtcagattcgtctgagcggtggtgccgaactgtttatgcgtcgtgcaagtctgaaaaaagaagaactggttgttcatccggcaaatagcccgattgcaaacaaaaatccggacaatccgaaaaaaaccacgacactgagctatgatgtgtataaagacaaacgttttagcgaggatcagtatctgctgcatatcccgattgccatcaataaatgcccgaaaaacatctttaagatcaacaccgaagttcgcgtgctgctgaaacatgatgataatccgtatgtgattggcattgatcgtggtgaacgtaacctgctgtatattgttgttgttgatggtaaaggcaacatcgtggaacagtatagtctgaacgaaattatcaacaactttaacggcatccgcatcaaaaccgactatcatagcctgctggacaagaaagaaaaagaacgttttgaagcacgtcagaactggaccagtattgaaaacatcaaagaactgaaagccggttatattagccaggtggttcataaaatctgtgagctggtagaaaaatacgatgcagttattgcactggaagatctgaatagcggtttcaaaaatagccgtgtgaaagtcgaaaaacaggtgtatcagaaattcgagaaaatgctgatcgacaaactgaactacatggtcgacaaaaaaagcaatccgtgtgcaaccggtggtgcactgaaaggttatcagattaccaacaaatttgaaagctttaaaagcatgagcacccagaacggctttatcttctatattccggcatggctgaccagcaaaattgatccgagcaccggttttgtgaacctgctgaaaacaaaatatacctccattgccgacagcaagaagtttattagcagctttgatcgcattatgtatgttccggaagaggacctgtttgaattcgcactggattacaaaaatttcagccgtaccgatgccgactacatcaaaaaatggaaactgtacagctatggtaaccgcattcgcatttttcgcaacccgaagaaaaacaatgtgttcgattgggaagaagtttgtctgaccagcgcatataaagaacttttcaacaaatacggcatcaactatcagcagggtgatattcgtgcactgctgtgtgaacagagcgataaagcgttttatagcagttttatggcactgatgagcctgatgctgcagatgcgtaatagcattaccggtcgcaccgatgtggattttctgattagtccggtgaaaaattccgatggcatcttttatgatagccgcaattacgaagcacaagaaaatgcaattctgccgaaaaacgcagatgcaaatggtgcatataacattgcacgtaaagttctgtgggcaattggccagtttaagaaagcagaagatgagaagctggacaaagtgaaaattgcgatcagcaataaagagtggctggaatacgcacagaccagcgttaaacatggaggcggaggatcaggcggtggcggaagtggtggaggtgggtcgggaggtggtggtagcatggttagcaaaggtgaagaactgtttaccggcgttgtgccgattctggtggaactggatggtgatgtgaatggccataaatttagcgttagcggcgaaggcgaaggtgatgcgacctatggtaaactgaccctgaaatttatttgcaccaccggtaaactgccggttccgtggccgaccctggtgaccaccctgacctatggcgttcagtgctttagccgctatccggatcatatgaaacagcatgatttctttaaaagcgcgatgccggaaggctatgtgcaggaacgtaccatttttttcaaagatgatggcaactataaaacccgtgcggaagttaaatttgaaggcgataccctggtgaaccgcattgaactgaaaggtattgattttaaagaagatggcaacattctgggtcataaactggaatataattacaacagccataatgtgtatattatggccgataaacagaaaaatggcatcaaagtgaactttaaaatccgtcacaacattgaagatggtagcgtgcagctggcggatcattatcagcagaataccccgattggtgatggcccggtgctgctgccggataatcattatctgagcacccagagcgcgctgagcaaagatccgaatgaaaaacgtgatcatatggtgctgctggaatttgttaccgccgcgggcattaccctgggtatggatgaactgtataaa

SEQ ID NO: 391 - DNA, 4446 bp, synthetic construct
  misc_feature 1..4446: note = SYNTHETIC
  source 1..4446: mol_type = other DNA
atgagcaaactggaaaagttcaccaactgttatagcctgagcaaaaccctgcgttttaaagcaattccggttggtaaaacccaagagaacattgataataaacgcctgctggtcgaagatgaaaaacgcgctgaagattataaaggcgtgaaaaaactgctggatcgctattatctgagcttcattaacgatgtgctgcacagcattaaactgaagaacctgaacaactatatcagcctgtttcgtaaaaaaacccgcaccgaaaaagaaaacaaagagctggaaaacctggaaatcaatctgcgtaaagaaatcgccaaagcgtttaaaggtaacgagggttataaaagcctgttcaagaaagacatcatcgaaaccattctgccggaatttctggatgataaagatgaaattgccctggtgaatagctttaatggctttaccaccgcatttaccggcttttttgataatcgcgaaaacatgttcagcgaagaagcaaaaagcaccagcattgcatttcgctgcattaatgaaaatctgacccgctacattagcaacatggatatctttgaaaaagtggacgcgatcttcgataaacacgaagtgcaagagatcaaagagaaaatcctgaacagcgattatgacgtcgaagatttttttgaaggcgagttctttaacttcgttctgacccaagaaggtatcgacgtttataacgcaattattggtggttttgttaccgaaagcggtgagaaaatcaaaggcctgaatgaatatatcaacctgtataaccagaaaaccaaacagaaactgccgaaattcaaaccgctgtataaacaggttctgagcgatcgtgaaagcctgagcttttatggtgaaggttataccagtgatgaagaggttctggaagtttttcgtaacaccctgaataaaaacagcgagatctttagcagcatcaaaaagcttgagaaactgttcaaaaactttgatgagtatagcagcgcaggcatctttgttaaaaatggtccggcaattagcaccatcagcaaagatatttttggcgaatggaatgtgatccgcgataaatggaatgccgaatatgatgatatccacctgaaaaaaaaggccgtggtgaccgagaaatatgaagatgatcgtcgtaaaagcttcaagaaaattggtagctttagcctggaacagctgcaagaatatgcagatgcagatctgagcgttgtggaaaaactgaaagaaatcatcattcagaaggtggacgagatctataaagtttatggtagcagcgaaaaactgttcgatgcagattttgttctggaaaaaagcctgaaaaagaatgatgccgttgtggccattatgaaagatctgctggatagcgttaagagcttcgagaattacatcaaagccttttttggtgagggcaaagaaaccaatcgtgatgaaagtttctatggcgattttgtgctggcctatgatattctgctgaaagtggaccatatttatgatgccattcgcaattatgttacccagaaaccgtatagcaaagacaagttcaaactgtactttcagaacccgcagtttatgggtggttgggataaagataaagaaaccgattatcgtgccaccatcctgcgttatggtagtaaatactatctggccatcatggacaaaaaatacgcaaaatgcctgcagaaaatcgacaaagatgatgtgaatggcaactatgaaaaaatcaactacaaactgctgcctggtccgaataaaatgctgccgaaagtgttctttagcaagaaatggatggcctattataacccgagcgaggatattcaaaagatctacaaaaatggcacctttaaaaagggcgacatgttcaatctgaacgattgccacaaactgatcgatttcttcaaagattcaatttcgcgttatccgaaatggtccaatgcctatgattttaactttagcgaaaccgaaaaatacaaagacattgccggtttttatcgcgaagtggaagaacagggctataaagtgagctttgaaagcgcaagcaaaaaagaggttgataagctggttgaagagggcaaactgtatatgttccagatttacaacaaagattttagcgacaaaagccatggcaccccgaatctgcataccatgtactttaaactgctgttcgacgaaaataaccatggtcagattcgtctgagcggtggtgccgaactgtttatgcgtcgtgcaagtctgaaaaaagaagaactggttgttcatccggcaaatagcccgattgcaaacaaaaatccggacaatccgaaaaaaaccacgacactgagctatgatgtgtataaagacaaacgttttagcgaggatcagtatctgctgcatatcccgattgccatcaataaatgcccgaaaaacatctttaagatcaacaccgaagttcgcgtgctgctgaaacatgatgataatccgtatgtgattggcattgatcgtggtgaacgtaacctgctgtatattgttgttgttgatggtaaaggcaacatcgtggaacagtatagtctgaacgaaattatcaacaactttaacggcatccgcatcaaaaccgactatcatagcctgctggacaagaaagaaaaagaacgttttgaagcacgtcagaactggaccagtattgaaaacatcaaagaactgaaagccggttatattagccaggtggttcataaaatctgtgagctggtagaaaaatacgatgcagttattgcactggaagatctgaatagcggtttcaaaaatagccgtgtgaaagtcgaaaaacaggtgtatcagaaattcgagaaaatgctgatcgacaaactgaactacatggtcgacaaaaaaagcaatccgtgtgcaaccggtggtgcactgaaaggttatcagattaccaacaaatttgaaagctttaaaagcatgagcacccagaacggctttatcttctatattccggcatggctgaccagcaaaattgatccgagcaccggttttgtgaacctgctgaaaacaaaatatacctccattgccgacagcaagaagtttattagcagctttgatcgcattatgtatgttccggaagaggacctgtttgaattcgcactggattacaaaaatttcagccgtaccgatgccgactacatcaaaaaatggaaactgtacagctatggtaaccgcattcgcatttttcgcaacccgaagaaaaacaatgtgttcgattgggaagaagtttgtctgaccagcgcatataaagaacttttcaacaaatacggcatcaactatcagcagggtgatattcgtgcactgctgtgtgaacagagcgataaagcgttttatagcagttttatggcactgatgagcctgatgctgcagatgcgtaatagcattaccggtcgcaccgatgtggattttctgattagtccggtgaaaaattccgatggcatcttttatgatagccgcaattacgaagcacaagaaaatgcaattctgccgaaaaacgcagatgcaaatggtgcatataacattgcacgtaaagttctgtgggcaattggccagtttaagaaagcagaagatgagaagctggacaaagtgaaaattgcgatcagcaataaagagtggctggaatacgcacagaccagcgttaaacatggaggcggagggtcggaagcggcagcaaaaggaggcggaggaagtatggttagcaaaggtgaagaactgtttaccggcgttgtgccgattctggtggaactggatggtgatgtgaatggccataaatttagcgttagcggcgaaggcgaaggtgatgcgacctatggtaaactgaccctgaaatttatttgcaccaccggtaaactgccggttccgtggccgaccctggtgaccaccctgacctatggcgttcagtgctttagccgctatccggatcatatgaaacagcatgatttctttaaaagcgcgatgccggaaggctatgtgcaggaacgtaccatttttttcaaagatgatggcaactataaaacccgtgcggaagttaaatttgaaggcgataccctggtgaaccgcattgaactgaaaggtattgattttaaagaagatggcaacattctgggtcataaactggaatataattacaacagccataatgtgtatattatggccgataaacagaaaaatggcatcaaagtgaactttaaaatccgtcacaacattgaagatggtagcgtgcagctggcggatcattatcagcagaataccccgattggtgatggcccggtgctgctgccggataatcattatctgagcacccagagcgcgctgagcaaagatccgaatgaaaaacgtgatcatatggtgctgctggaatttgttaccgccgcgggcattaccctgggtatggatgaactgtataaa

SEQ ID NO: 392 - DNA, 4467 bp, synthetic construct
  misc_feature 1..4467: note = SYNTHETIC
  source 1..4467: mol_type = other DNA
atgagcaaactggaaaagttcaccaactgttatagcctgagcaaaaccctgcgttttaaagcaattccggttggtaaaacccaagagaacattgataataaacgcctgctggtcgaagatgaaaaacgcgctgaagattataaaggcgtgaaaaaactgctggatcgctattatctgagcttcattaacgatgtgctgcacagcattaaactgaagaacctgaacaactatatcagcctgtttcgtaaaaaaacccgcaccgaaaaagaaaacaaagagctggaaaacctggaaatcaatctgcgtaaagaaatcgccaaagcgtttaaaggtaacgagggttataaaagcctgttcaagaaagacatcatcgaaaccattctgccggaatttctggatgataaagatgaaattgccctggtgaatagctttaatggctttaccaccgcatttaccggcttttttgataatcgcgaaaacatgttcagcgaagaagcaaaaagcaccagcattgcatttcgctgcattaatgaaaatctgacccgctacattagcaacatggatatctttgaaaaagtggacgcgatcttcgataaacacgaagtgcaagagatcaaagagaaaatcctgaacagcgattatgacgtcgaagatttttttgaaggcgagttctttaacttcgttctgacccaagaaggtatcgacgtttataacgcaattattggtggttttgttaccgaaagcggtgagaaaatcaaaggcctgaatgaatatatcaacctgtataaccagaaaaccaaacagaaactgccgaaattcaaaccgctgtataaacaggttctgagcgatcgtgaaagcctgagcttttatggtgaaggttataccagtgatgaagaggttctggaagtttttcgtaacaccctgaataaaaacagcgagatctttagcagcatcaaaaagcttgagaaactgttcaaaaactttgatgagtatagcagcgcaggcatctttgttaaaaatggtccggcaattagcaccatcagcaaagatatttttggcgaatggaatgtgatccgcgataaatggaatgccgaatatgatgatatccacctgaaaaaaaaggccgtggtgaccgagaaatatgaagatgatcgtcgtaaaagcttcaagaaaattggtagctttagcctggaacagctgcaagaatatgcagatgcagatctgagcgttgtggaaaaactgaaagaaatcatcattcagaaggtggacgagatctataaagtttatggtagcagcgaaaaactgttcgatgcagattttgttctggaaaaaagcctgaaaaagaatgatgccgttgtggccattatgaaagatctgctggatagcgttaagagcttcgagaattacatcaaagccttttttggtgagggcaaagaaaccaatcgtgatgaaagtttctatggcgattttgtgctggcctatgatattctgctgaaagtggaccatatttatgatgccattcgcaattatgttacccagaaaccgtatagcaaagacaagttcaaactgtactttcagaacccgcagtttatgggtggttgggataaagataaagaaaccgattatcgtgccaccatcctgcgttatggtagtaaatactatctggccatcatggacaaaaaatacgcaaaatgcctgcagaaaatcgacaaagatgatgtgaatggcaactatgaaaaaatcaactacaaactgctgcctggtccgaataaaatgctgccgaaagtgttctttagcaagaaatggatggcctattataacccgagcgaggatattcaaaagatctacaaaaatggcacctttaaaaagggcgacatgttcaatctgaacgattgccacaaactgatcgatttcttcaaagattcaatttcgcgttatccgaaatggtccaatgcctatgattttaactttagcgaaaccgaaaaatacaaagacattgccggtttttatcgcgaagtggaagaacagggctataaagtgagctttgaaagcgcaagcaaaaaagaggttgataagctggttgaagagggcaaactgtatatgttccagatttacaacaaagattttagcgacaaaagccatggcaccccgaatctgcataccatgtactttaaactgctgttcgacgaaaataaccatggtcagattcgtctgagcggtggtgccgaactgtttatgcgtcgtgcaagtctgaaaaaagaagaactggttgttcatccggcaaatagcccgattgcaaacaaaaatccggacaatccgaaaaaaaccacgacactgagctatgatgtgtataaagacaaacgttttagcgaggatcagtatctgctgcatatcccgattgccatcaataaatgcccgaaaaacatctttaagatcaacaccgaagttcgcgtgctgctgaaacatgatgataatccgtatgtgattggcattgatcgtggtgaacgtaacctgctgtatattgttgttgttgatggtaaaggcaacatcgtggaacagtatagtctgaacgaaattatcaacaactttaacggcatccgcatcaaaaccgactatcatagcctgctggacaagaaagaaaaagaacgttttgaagcacgtcagaactggaccagtattgaaaacatcaaagaactgaaagccggttatattagccaggtggttcataaaatctgtgagctggtagaaaaatacgatgcagttattgcactggaagatctgaatagcggtttcaaaaatagccgtgtgaaagtcgaaaaacaggtgtatcagaaattcgagaaaatgctgatcgacaaactgaactacatggtcgacaaaaaaagcaatccgtgtgcaaccggtggtgcactgaaaggttatcagattaccaacaaatttgaaagctttaaaagcatgagcacccagaacggctttatcttctatattccggcatggctgaccagcaaaattgatccgagcaccggttttgtgaacctgctgaaaacaaaatatacctccattgccgacagcaagaagtttattagcagctttgatcgcattatgtatgttccggaagaggacctgtttgaattcgcactggattacaaaaatttcagccgtaccgatgccgactacatcaaaaaatggaaactgtacagctatggtaaccgcattcgcatttttcgcaacccgaagaaaaacaatgtgttcgattgggaagaagtttgtctgaccagcgcatataaagaacttttcaacaaatacggcatcaactatcagcagggtgatattcgtgcactgctgtgtgaacagagcgataaagcgttttatagcagttttatggcactgatgagcctgatgctgcagatgcgtaatagcattaccggtcgcaccgatgtggattttctgattagtccggtgaaaaattccgatggcatcttttatgatagccgcaattacgaagcacaagaaaatgcaattctgccgaaaaacgcagatgcaaatggtgcatataacattgcacgtaaagttctgtgggcaattggccagtttaagaaagcagaagatgagaagctggacaaagtgaaaattgcgatcagcaataaagagtggctggaatacgcacagaccagcgttaaacatgctgaggccgcagcaaaagaggctgccgctaaggaggctgctgcaaaagaagcagcagcgaaagctatggttagcaaaggtgaagaactgtttaccggcgttgtgccgattctggtggaactggatggtgatgtgaatggccataaatttagcgttagcggcgaaggcgaaggtgatgcgacctatggtaaactgaccctgaaatttatttgcaccaccggtaaactgccggttccgtggccgaccctggtgaccaccctgacctatggcgttcagtgctttagccgctatccggatcatatgaaacagcatgatttctttaaaagcgcgatgccggaaggctatgtgcaggaacgtaccatttttttcaaagatgatggcaactataaaacccgtgcggaagttaaatttgaaggcgataccctggtgaaccgcattgaactgaaaggtattgattttaaagaagatggcaacattctgggtcataaactggaatataattacaacagccataatgtgtatattatggccgataaacagaaaaatggcatcaaagtgaactttaaaatccgtcacaacattgaagatggtagcgtgcagctggcggatcattatcagcagaataccccgattggtgatggcccggtgctgctgccggataatcattatctgagcacccagagcgcgctgagcaaagatccgaatgaaaaacgtgatcatatggtgctgctggaatttgttaccgccgcgggcattaccctgggtatggatgaactgtataaa

SEQ ID NO: 393 - DNA, 4539 bp, synthetic construct
  misc_feature 1..4539: note = SYNTHETIC
  source 1..4539: mol_type = other DNA
atgagcaaactggaaaagttcaccaactgttatagcctgagcaaaaccctgcgttttaaagcaattccggttggtaaaacccaagagaacattgataataaacgcctgctggtcgaagatgaaaaacgcgctgaagattataaaggcgtgaaaaaactgctggatcgctattatctgagcttcattaacgatgtgctgcacagcattaaactgaagaacctgaacaactatatcagcctgtttcgtaaaaaaacccgcaccgaaaaagaaaacaaagagctggaaaacctggaaatcaatctgcgtaaagaaatcgccaaagcgtttaaaggtaacgagggttataaaagcctgttcaagaaagacatcatcgaaaccattctgccggaatttctggatgataaagatgaaattgccctggtgaatagctttaatggctttaccaccgcatttaccggcttttttgataatcgcgaaaacatgttcagcgaagaagcaaaaagcaccagcattgcatttcgctgcattaatgaaaatctgacccgctacattagcaacatggatatctttgaaaaagtggacgcgatcttcgataaacacgaagtgcaagagatcaaagagaaaatcctgaacagcgattatgacgtcgaagatttttttgaaggcgagttctttaacttcgttctgacccaagaaggtatcgacgtttataacgcaattattggtggttttgttaccgaaagcggtgagaaaatcaaaggcctgaatgaatatatcaacctgtataaccagaaaaccaaacagaaactgccgaaattcaaaccgctgtataaacaggttctgagcgatcgtgaaagcctgagcttttatggtgaaggttataccagtgatgaagaggttctggaagtttttcgtaacaccctgaataaaaacagcgagatctttagcagcatcaaaaagcttgagaaactgttcaaaaactttgatgagtatagcagcgcaggcatctttgttaaaaatggtccggcaattagcaccatcagcaaagatatttttggcgaatggaatgtgatccgcgataaatggaatgccgaatatgatgatatccacctgaaaaaaaaggccgtggtgaccgagaaatatgaagatgatcgtcgtaaaagcttcaagaaaattggtagctttagcctggaacagctgcaagaatatgcagatgcagatctgagcgttgtggaaaaactgaaagaaatcatcattcagaaggtggacgagatctataaagtttatggtagcagcgaaaaactgttcgatgcagattttgttctggaaaaaagcctgaaaaagaatgatgccgttgtggccattatgaaagatctgctggatagcgttaagagcttcgagaattacatcaaagccttttttggtgagggcaaagaaaccaatcgtgatgaaagtttctatggcgattttgtgctggcctatgatattctgctgaaagtggaccatatttatgatgccattcgcaattatgttacccagaaaccgtatagcaaagacaagttcaaactgtactttcagaacccgcagtttatgggtggttgggataaagataaagaaaccgattatcgtgccaccatcctgcgttatggtagtaaatactatctggccatcatggacaaaaaatacgcaaaatgcctgcagaaaatcgacaaagatgatgtgaatggcaactatgaaaaaatcaactacaaactgctgcctggtccgaataaaatgctgccgaaagtgttctttagcaagaaatggatggcctattataacccgagcgaggatattcaaaagatctacaaaaatggcacctttaaaaagggcgacatgttcaatctgaacgattgccacaaactgatcgatttcttcaaagattcaatttcgcgttatccgaaatggtccaatgcctatgattttaactttagcgaaaccgaaaaatacaaagacattgccggtttttatcgcgaagtggaagaacagggctataaagtgagctttgaaagcgcaagcaaaaaagaggttgataagctggttgaagagggcaaactgtatatgttccagatttacaacaaagattttagcgacaaaagccatggcaccccgaatctgcataccatgtactttaaactgctgttcgacgaaaataaccatggtcagattcgtctgagcggtggtgccgaactgtttatgcgtcgtgcaagtctgaaaaaagaagaactggttgttcatccggcaaatagcccgattgcaaacaaaaatccggacaatccgaaaaaaaccacgacactgagctatgatgtgtataaagacaaacgttttagcgaggatcagtatctgctgcatatcccgattgccatcaataaatgcccgaaaaacatctttaagatcaacaccgaagttcgcgtgctgctgaaacatgatgataatccgtatgtgattggcattgatcgtggtgaacgtaacctgctgtatattgttgttgttgatggtaaaggcaacatcgtggaacagtatagtctgaacgaaattatcaacaactttaacggcatccgcatcaaaaccgactatcatagcctgctggacaagaaagaaaaagaacgttttgaagcacgtcagaactggaccagtattgaaaacatcaaagaactgaaagccggttatattagccaggtggttcataaaatctgtgagctggtagaaaaatacgatgcagttattgcactggaagatctgaatagcggtttcaaaaatagccgtgtgaaagtcgaaaaacaggtgtatcagaaattcgagaaaatgctgatcgacaaactgaactacatggtcgacaaaaaaagcaatccgtgtgcaaccggtggtgcactgaaaggttatcagattaccaacaaatttgaaagctttaaaagcatgagcacccagaacggctttatcttctatattccggcatggctgaccagcaaaattgatccgagcaccggttttgtgaacctgctgaaaacaaaatatacctccattgccgacagcaagaagtttattagcagctttgatcgcattatgtatgttccggaagaggacctgtttgaattcgcactggattacaaaaatttcagccgtaccgatgccgactacatcaaaaaatggaaactgtacagctatggtaaccgcattcgcatttttcgcaacccgaagaaaaacaatgtgttcgattgggaagaagtttgtctgaccagcgcatataaagaacttttcaacaaatacggcatcaactatcagcagggtgatattcgtgcactgctgtgtgaacagagcgataaagcgttttatagcagttttatggcactgatgagcctgatgctgcagatgcgtaatagcattaccggtcgcaccgatgtggattttctgattagtccggtgaaaaattccgatggcatcttttatgatagccgcaattacgaagcacaagaaaatgcaattctgccgaaaaacgcagatgcaaatggtgcatataacattgcacgtaaagttctgtgggcaattggccagtttaagaaagcagaagatgagaagctggacaaagtgaaaattgcgatcagcaataaagagtggctggaatacgcacagaccagcgttaaacatgccgaagcagcagccaaagaagctgccgcaaaggaggcggcagctaaagaagcggccgctaaggcattggaagcggaggcggctgccaaggaggctgcggcgaaagaagctgcggccaaagaagcggctgcaaaagcgatggttagcaaaggtgaagaactgtttaccggcgttgtgccgattctggtggaactggatggtgatgtgaatggccataaatttagcgttagcggcgaaggcgaaggtgatgcgacctatggtaaactgaccctgaaatttatttgcaccaccggtaaactgccggttccgtggccgaccctggtgaccaccctgacctatggcgttcagtgctttagccgctatccggatcatatgaaacagcatgatttctttaaaagcgcgatgccggaaggctatgtgcaggaacgtaccatttttttcaaagatgatggcaactataaaacccgtgcggaagttaaatttgaaggcgataccctggtgaaccgcattgaactgaaaggtattgattttaaagaagatggcaacattctgggtcataaactggaatataattacaacagccataatgtgtatattatggccgataaacagaaaaatggcatcaaagtgaactttaaaatccgtcacaacattgaagatggtagcgtgcagctggcggatcattatcagcagaataccccgattggtgatggcccggtgctgctgccggataatcattatctgagcacccagagcgcgctgagcaaagatccgaatgaaaaacgtgatcatatggtgctgctggaatttgttaccgccgcgggcattaccctgggtatggatgaactgtataaa

SEQ ID NO: 394 - DNA, 4551 bp, synthetic construct
  misc_feature 1..4551: note = SYNTHETIC
  source 1..4551: mol_type = other DNA
atgagcaaactggaaaagttcaccaactgttatagcctgagcaaaaccctgcgttttaaagcaattccggttggtaaaacccaagagaacattgataataaacgcctgctggtcgaagatgaaaaacgcgctgaagattataaaggcgtgaaaaaactgctggatcgctattatctgagcttcattaacgatgtgctgcacagcattaaactgaagaacctgaacaactatatcagcctgtttcgtaaaaaaacccgcaccgaaaaagaaaacaaagagctggaaaacctggaaatcaatctgcgtaaagaaatcgccaaagcgtttaaaggtaacgagggttataaaagcctgttcaagaaagacatcatcgaaaccattctgccggaatttctggatgataaagatgaaattgccctggtgaatagctttaatggctttaccaccgcatttaccggcttttttgataatcgcgaaaacatgttcagcgaagaagcaaaaagcaccagcattgcatttcgctgcattaatgaaaatctgacccgctacattagcaacatggatatctttgaaaaagtggacgcgatcttcgataaacacgaagtgcaagagatcaaagagaaaatcctgaacagcgattatgacgtcgaagatttttttgaaggcgagttctttaacttcgttctgacccaagaaggtatcgacgtttataacgcaattattggtggttttgttaccgaaagcggtgagaaaatcaaaggcctgaatgaatatatcaacctgtataaccagaaaaccaaacagaaactgccgaaattcaaaccgctgtataaacaggttctgagcgatcgtgaaagcctgagcttttatggtgaaggttataccagtgatgaagaggttctggaagtttttcgtaacaccctgaataaaaacagcgagatctttagcagcatcaaaaagcttgagaaactgttcaaaaactttgatgagtatagcagcgcaggcatctttgttaaaaatggtccggcaattagcaccatcagcaaagatatttttggcgaatggaatgtgatccgcgataaatggaatgccgaatatgatgatatccacctgaaaaaaaaggccgtggtgaccgagaaatatgaagatgatcgtcgtaaaagcttcaagaaaattggtagctttagcctggaacagctgcaagaatatgcagatgcagatctgagcgttgtggaaaaactgaaagaaatcatcattcagaaggtggacgagatctataaagtttatggtagcagcgaaaaactgttcgatgcagattttgttctggaaaaaagcctgaaaaagaatgatgccgttgtggccattatgaaagatctgctggatagcgttaagagcttcgagaattacatcaaagccttttttggtgagggcaaagaaaccaatcgtgatgaaagtttctatggcgattttgtgctggcctatgatattctgctgaaagtggaccatatttatgatgccattcgcaattatgttacccagaaaccgtatagcaaagacaagttcaaactgtactttcagaacccgcagtttatgggtggttgggataaagataaagaaaccgattatcgtgccaccatcctgcgttatggtagtaaatactatctggccatcatggacaaaaaatacgcaaaatgcctgcagaaaatcgacaaagatgatgtgaatggcaactatgaaaaaatcaactacaaactgctgcctggtccgaataaaatgctgccgaaagtgttctttagcaagaaatggatggcctattataacccgagcgaggatattcaaaagatctacaaaaatggcacctttaaaaagggcgacatgttcaatctgaacgattgccacaaactgatcgatttcttcaaagattcaatttcgcgttatccgaaatggtccaatgcctatgattttaactttagcgaaaccgaaaaatacaaagacattgccggtttttatcgcgaagtggaagaacagggctataaagtgagctttgaaagcgcaagcaaaaaagaggttgataagctggttgaagagggcaaactgtatatgttccagatttacaacaaagattttagcgacaaaagccatggcaccccgaatctgcataccatgtactttaaactgctgttcgacgaaaataaccatggtcagattcgtctgagcggtggtgccgaactgtttatgcgtcgtgcaagtctgaaaaaagaagaactggttgttcatccggcaaatagcccgattgcaaacaaaaatccggacaatccgaaaaaaaccacgacactgagctatgatgtgtataaagacaaacgttttagcgaggatcagtatctgctgcatatcccgattgccatcaataaatgcccgaaaaacatctttaagatcaacaccgaagttcgcgtgctgctgaaacatgatgataatccgtatgtgattggcattgatcgtggtgaacgtaacctgctgtatattgttgttgttgatggtaaaggcaacatcgtggaacagtatagtctgaacgaaattatcaacaactttaacggcatccgcatcaaaaccgactatcatagcctgctggacaagaaagaaaaagaacgttttgaagcacgtcagaactggaccagtattgaaaacatcaaagaactgaaagccggttatattagccaggtggttcataaaatctgtgagctggtagaaaaatacgatgcagttattgcactggaagatctgaatagcggtttcaaaaatagccgtgtgaaagtcgaaaaacaggtgtatcagaaattcgagaaaatgctgatcgacaaactgaactacatggtcgacaaaaaaagcaatccgtgtgcaaccggtggtgcactgaaaggttatcagattaccaacaaatttgaaagctttaaaagcatgagcacccagaacggctttatcttctatattccggcatggctgaccagcaaaattgatccgagcaccggttttgtgaacctgctgaaaacaaaatatacctccattgccgacagcaagaagtttattagcagctttgatcgcattatgtatgttccggaagaggacctgtttgaattcgcactggattacaaaaatttcagccgtaccgatgccgactacatcaaaaaatggaaactgtacagctatggtaaccgcattcgcatttttcgcaacccgaagaaaaacaatgtgttcgattgggaagaagtttgtctgaccagcgcatataaagaacttttcaacaaatacggcatcaactatcagcagggtgatattcgtgcactgctgtgtgaacagagcgataaagcgttttatagcagttttatggcactgatgagcctgatgctgcagatgcgtaatagcattaccggtcgcaccgatgtggattttctgattagtccggtgaaaaattccgatggcatcttttatgatagccgcaattacgaagcacaagaaaatgcaattctgccgaaaaacgcagatgcaaatggtgcatataacattgcacgtaaagttctgtgggcaattggccagtttaagaaagcagaagatgagaagctggacaaagtgaaaattgcgatcagcaataaagagtggctggaatacgcacagaccagcgttaaacatttagaggctgaggctgctgccaaggaggctgctgcgaaggaagctgcagctaaagaggcagcggccaaagcacttgaggccgaagccgccgcgaaagaagccgctgctaaggaggcagccgccaaagaagcggcagctaaagcattagaaatggttagcaaaggtgaagaactgtttaccggcgttgtgccgattctggtggaactggatggtgatgtgaatggccataaatttagcgttagcggcgaaggcgaaggtgatgcgacctatggtaaactgaccctgaaatttatttgcaccaccggtaaactgccggttccgtggccgaccctggtgaccaccctgacctatggcgttcagtgctttagccgctatccggatcatatgaaacagcatgatttctttaaaagcgcgatgccggaaggctatgtgcaggaacgtaccatttttttcaaagatgatggcaactataaaacccgtgcggaagttaaatttgaaggcgataccctggtgaaccgcattgaactgaaaggtattgattttaaagaagatggcaacattctgggtcataaactggaatataattacaacagccataatgtgtatattatggccgataaacagaaaaatggcatcaaagtgaactttaaaatccgtcacaacattgaagatggtagcgtgcagctggcggatcattatcagcagaataccccgattggtgatggcccggtgctgctgccggataatcattatctgagcacccagagcgcgctgagcaaagatccgaatgaaaaacgtgatcatatggtgctgctggaatttgttaccgccgcgggcattaccctgggtatggatgaactgtataaa

SEQ ID NO: 395 - DNA, 4410 bp, synthetic construct; identical to SEQ ID NO: 388
  misc_feature 1..4410: note = SYNTHETIC
  source 1..4410: mol_type = other DNA

SEQ ID NO: 396 - DNA, 4416 bp, synthetic construct
  misc_feature 1..4416: note = SYNTHETIC
  source 1..4416: mol_type = other DNA
atgagcaaactggaaaagttcaccaactgttatagcctgagcaaaaccctgcgttttaaagcaattccggttggtaaaacccaagagaacattgataataaacgcctgctggtcgaagatgaaaaacgcgctgaagattataaaggcgtgaaaaaactgctggatcgctattatctgagcttcattaacgatgtgctgcacagcattaaactgaagaacctgaacaactatatcagcctgtttcgtaaaaaaacccgcaccgaaaaagaaaacaaagagctggaaaacctggaaatcaatctgcgtaaagaaatcgccaaagcgtttaaaggtaacgagggttataaaagcctgttcaagaaagacatcatcgaaaccattctgccggaatttctggatgataaagatgaaattgccctggtgaatagctttaatggctttaccaccgcatttaccggcttttttgataatcgcgaaaacatgttcagcgaagaagcaaaaagcaccagcattgcatttcgctgcattaatgaaaatctgacccgctacattagcaacatggatatctttgaaaaagtggacgcgatcttcgataaacacgaagtgcaagagatcaaagagaaaatcctgaacagcgattatgacgtcgaagatttttttgaaggcgagttctttaacttcgttctgacccaagaaggtatcgacgtttataacgcaattattggtggttttgttaccgaaagcggtgagaaaatcaaaggcctgaatgaatatatcaacctgtataaccagaaaaccaaacagaaactgccgaaattcaaaccgctgtataaacaggttctgagcgatcgtgaaagcctgagcttttatggtgaaggttataccagtgatgaagaggttctggaagtttttcgtaacaccctgaataaaaacagcgagatctttagcagcatcaaaaagcttgagaaactgttcaaaaactttgatgagtatagcagcgcaggcatctttgttaaaaatggtccggcaattagcaccatcagcaaagatatttttggcgaatggaatgtgatccgcgataaatggaatgccgaatatgatgatatccacctgaaaaaaaaggccgtggtgaccgagaaatatgaagatgatcgtcgtaaaagcttcaagaaaattggtagctttagcctggaacagctgcaagaatatgcagatgcagatctgagcgttgtggaaaaactgaaagaaatcatcattcagaaggtggacgagatctataaagtttatggtagcagcgaaaaactgttcgatgcagattttgttctggaaaaaagcctgaaaaagaatgatgccgttgtggccattatgaaagatctgctggatagcgttaagagcttcgagaattacatcaaagccttttttggtgagggcaaagaaaccaatcgtgatgaaagtttctatggcgattttgtgctggcctatgatattctgctgaaagtggaccatatttatgatgccattcgcaattatgttacccagaaaccgtatagcaaagacaagttcaaactgtactttcagaacccgcagtttatgggtggttgggataaagataaagaaaccgattatcgtgccaccatcctgcgttatggtagtaaatactatctggccatcatggacaaaaaatacgcaaaatgcctgcagaaaatcgacaaagatgatgtgaatggcaactatgaaaaaatcaactacaaactgctgcctggtccgaataaaatgctgccgaaagtgttctttagcaagaaatggatggcctattataacccgagcgaggatattcaaaagatctacaaaaatggcacctttaaaaagggcgacatgttcaatctgaacgattgccacaaactgatcgatttcttcaaagattcaatttcgcgttatccgaaatggtccaatgcctatgattttaactttagcgaaaccgaaaaatacaaagacattgccggtttttatcgcgaagtggaagaacagggctataaagtgagctttgaaagcgcaagcaaaaaagaggttgataagctggttgaagagggcaaactgtatatgttccagatttacaacaaagattttagcgacaaaagccatggcaccccgaatctgcataccatgtactttaaactgctgttcgacgaaaataaccatggtcagattcgtctgagcggtggtgccgaactgtttatgcgtcgtgcaagtctgaaaaaagaagaactggttgttcatccggcaaatagcccgattgcaaacaaaaatccggacaatccgaaaaaaaccacgacactgagctatgatgtgtataaagacaaacgttttagcgaggatcagtatctgctgcatatcccgattgccatcaataaatgcccgaaaaacatctttaagatcaacaccgaagttcgcgtgctgctgaaacatgatgataatccgtatgtgattggcattgatcgtggtgaacgtaacctgctgtatattgttgttgttgatggtaaaggcaacatcgtggaacagtatagtctgaacgaaattatcaacaactttaacggcatccgcatcaaaaccgactatcatagcctgctggacaagaaagaaaaagaacgttttgaagcacgtcagaactggaccagtattgaaaacatcaaagaactgaaagccggttatattagccaggtggttcataaaatctgtgagctggtagaaaaatacgatgcagttattgcactggaagatctgaatagcggtttcaaaaatagccgtgtgaaagtcgaaaaacaggtgtatcagaaattcgagaaaatgctgatcgacaaactgaactacatggtcgacaaaaaaagcaatccgtgtgcaaccggtggtgcactgaaaggttatcagattaccaacaaatttgaaagctttaaaagcatgagcacccagaacggctttatcttctatattccggcatggctgaccagcaaaattgatccgagcaccggttttgtgaacctgctgaaaacaaaatatacctccattgccgacagcaagaagtttattagcagctttgatcgcattatgtatgttccggaagaggacctgtttgaattcgcactggattacaaaaatttcagccgtaccgatgccgactacatcaaaaaatggaaactgtacagctatggtaaccgcattcgcatttttcgcaacccgaagaaaaacaatgtgttcgattgggaagaagtttgtctgaccagcgcatataaagaacttttcaacaaatacggcatcaactatcagcagggtgatattcgtgcactgctgtgtgaacagagcgataaagcgttttatagcagttttatggcactgatgagcctgatgctgcagatgcgtaatagcattaccggtcgcaccgatgtggattttctgattagtccggtgaaaaattccgatggcatcttttatgatagccgcaattacgaagcacaagaaaatgcaattctgccgaaaaacgcagatgcaaatggtgcatataacattgcacgtaaagttctgtgggcaattggccagtttaagaaagcagaagatgagaagctggacaaagtgaaaattgcgatcagcaataaagagtggctggaatacgcacagaccagcgttaaacatgctcctgcacctgcgatggttagcaaaggtgaagaactgtttaccggcgttgtgccgattctggtggaactggatggtgatgtgaatggccataaatttagcgttagcggcgaaggcgaaggtgatgcgacctatggtaaactgaccctgaaatttatttgcaccaccggtaaactgccggttccgtggccgaccctggtgaccaccctgacctatggcgttcagtgctttagccgctatccggatcatatgaaacagcatgatttctttaaaagcgcgatgccggaaggctatgtgcaggaacgtaccatttttttcaaagatgatggcaactataaaacccgtgcggaagttaaatttgaaggcgataccctggtgaaccgcattgaactgaaaggtattgattttaaagaagatggcaacattctgggtcataaactggaatataattacaacagccataatgtgtatattatggccgataaacagaaaaatggcatcaaagtgaactttaaaatccgtcacaacattgaagatggtagcgtgcagctggcggatcattatcagcagaataccccgattggtgatggcccggtgctgctgccggataatcattatctgagcacccagagcgcgctgagcaaagatccgaatgaaaaacgtgatcatatggtgctgctggaatttgttaccgccgcgggcattaccctgggtatggatgaactgtataaa

SEQ ID NO: 397 - DNA, 4422 bp, synthetic construct
  misc_feature 1..4422: note = SYNTHETIC
  source 1..4422: mol_type = other DNA
atgagcaaactggaaaagttcaccaactgttatagcctgagcaaaaccctgcgttttaaagcaattccggttggtaaaacccaagagaacattgataataaacgcctgctggtcgaagatgaaaaacgcgctgaagattataaaggcgtgaaaaaactgctggatcgctattatctgagcttcattaacgatgtgctgcacagcattaaactgaagaacctgaacaactatatcagcctgtttcgtaaaaaaacccgcaccgaaaaagaaaacaaagagctggaaaacctggaaatcaatctgcgtaaagaaatcgccaaagcgtttaaaggtaacgagggttataaaagcctgttcaagaaagacatcatcgaaaccattctgccggaatttctggatgataaagatgaaattgccctggtgaatagctttaatggctttaccaccgcatttaccggcttttttgataatcgcgaaaacatgttcagcgaagaagcaaaaagcaccagcattgcatttcgctgcattaatgaaaatctgacccgctacattagcaacatggatatctttgaaaaagtggacgcgatcttcgataaacacgaagtgcaagagatcaaagagaaaatcctgaacagcgattatgacgtcgaagatttttttgaaggcgagttctttaacttcgttctgacccaagaaggtatcgacgtttataacgcaattattggtggttttgttaccgaaagcggtgagaaaatcaaaggcctgaatgaatatatcaacctgtataaccagaaaaccaaacagaaactgccgaaattcaaaccgctgtataaacaggttctgagcgatcgtgaaagcctgagcttttatggtgaaggttataccagtgatgaagaggttctggaagtttttcgtaacaccctgaataaaaacagcgagatctttagcagcatcaaaaagcttgagaaactgttcaaaaactttgatgagtatagcagcgcaggcatctttgttaaaaatggtccggcaattagcaccatcagcaaagatatttttggcgaatggaatgtgatccgcgataaatggaatgccgaatatgatgatatccacctgaaaaaaaaggccgtggtgaccgagaaatatgaagatgatcgtcgtaaaagcttcaagaaaattggtagctttagcctggaacagctgcaagaatatgcagatgcagatctgagcgttgtggaaaaactgaaagaaatcatcattcagaaggtggacgagatctataaagtttatggtagcagcgaaaaactgttcgatgcagattttgttctggaaaaaagcctgaaaaagaatgatgccgttgtggccattatgaaagatctgctggatagcgttaagagcttcgagaattacatcaaagccttttttggtgagggcaaagaaaccaatcgtgatgaaagtttctatggcgattttgtgctggcctatgatattctgctgaaagtggaccatatttatgatgccattcgcaattatgttacccagaaaccgtatagcaaagacaagttcaaactgtactttcagaacccgcagtttatgggtggttgggataaagataaagaaaccgattatcgtgccaccatcctgcgttatggtagtaaatactatctggccatcatggacaaaaaatacgcaaaatgcctgcagaaaatcgacaaagatgatgtgaatggcaactatgaaaaaatcaactacaaactgctgcctggtccgaataaaatgctgccgaaagtgttctttagcaagaaatggatggcctattataacccgagcgaggatattcaaaagatctacaaaaatggcacctttaaaaagggcgacatgttcaatctgaacgattgccacaaactgatcgatttcttcaaagattcaatttcgcgttatccgaaatggtccaatgcctatgattttaactttagcgaaaccgaaaaatacaaagacattgccggtttttatcgcgaagtggaagaacagggctataaagtgagctttgaaagcgcaagcaaaaaagaggttgataagctggttgaagagggcaaactgtatatgttccagatttacaacaaagattttagcgacaaaagccatggcaccccgaatctgcataccatgtactttaaactgctgttcgacgaaaataaccatggtcagattcgtctgagcggtggtgccgaactgtttatgcgtcgtgcaagtctgaaaaaagaagaactggttgttcatccggcaaatagcccgattgcaaacaaaaatccggacaatccgaaaaaaaccacgacactgagctatgatgtgtataaagacaaacgttttagcgaggatcagtatctgctgcatatcccgattgccatcaataaatgcccgaaaaacatctttaagatcaacaccgaagttcgcgtgctgctgaaacatgatgataatccgtatgtgattggcattgatcgtggtgaacgtaacctgctgtatattgttgttgttgatggtaaaggcaacatcgtggaacagtatagtctgaacgaaattatcaacaactttaacggcatccgcatcaaaaccgactatcatagcctgctggacaagaaagaaaaagaacgttttgaagcacgtcagaactggaccagtattgaaaacatcaaagaactgaaagccggttatattagccaggtggttcataaaatctgtgagctggtagaaaaatacgatgcagttattgcactggaagatctgaatagcggtttcaaaaatagccgtgtgaaagtcgaaaaacaggtgtatcagaaattcgagaaaatgctgatcgacaaactgaactacatggtcgacaaaaaaagcaatccgtgtgcaaccggtggtgcactgaaaggttatcagattaccaacaaatttgaaagctttaaaagcatgagcacccagaacggctttatcttctatattccggcatggctgaccagcaaaattgatccgagcaccggttttgtgaacctgctgaaaacaaaatatacctccattgccgacagcaagaagtttattagcagctttgatcgcattatgtatgttccggaagaggacctgtttgaattcgcactggattacaaaaatttcagccgtaccgatgccgactacatcaaaaaatggaaactgtacagctatggtaaccgcattcgcatttttcgcaacccgaagaaaaacaatgtgttcgattgggaagaagtttgtctgaccagcgcatataaagaacttttcaacaaatacggcatcaactatcagcagggtgatattcgtgcactgctgtgtgaacagagcgataaagcgttttatagcagttttatggcactgatgagcctgatgctgcagatgcgtaatagcattaccggtcgcaccgatgtggattttctgattagtccggtgaaaaattccgatggcatcttttatgatagccgcaattacgaagcacaagaaaatgcaattctgccgaaaaacgcagatgcaaatggtgcatataacattgcacgtaaagttctgtgggcaattggccagtttaagaaagcagaagatgagaagctggacaaagtgaaaattgcgatcagcaataaagagtggctggaatacgcacagaccagcgttaaacatgcgccagctcctgcacctgcgatggttagcaaaggtgaagaactgtttaccggcgttgtgccgattctggtggaactggatggtgatgtgaatggccataaatttagcgttagcggcgaaggcgaaggtgatgcgacctatggtaaactgaccctgaaatttatttgcaccaccggtaaactgccggttccgtggccgaccctggtgaccaccctgacctatggcgttcagtgctttagccgctatccggatcatatgaaacagcatgatttctttaaaagcgcgatgccggaaggctatgtgcaggaacgtaccatttttttcaaagatgatggcaactataaaacccgtgcggaagttaaatttgaaggcgataccctggtgaaccgcattgaactgaaaggtattgattttaaagaagatggcaacattctgggtcataaactggaatataattacaacagccataatgtgtatattatggccgataaacagaaaaatggcatcaaagtgaactttaaaatccgtcacaacattgaagatggtagcgtgcagctggcggatcattatcagcagaataccccgattggtgatggcccggtgctgctgccggataatcattatctgagcacccagagcgcgctgagcaaagatccgaatgaaaaacgtgatcatatggtgctgctggaatttgttaccgccgcgggcattaccctgggtatggatgaactgtataaa

SEQ ID NO: 398 - DNA, 4428 bp, synthetic construct
  misc_feature 1..4428: note = SYNTHETIC
  source 1..4428: mol_type = other DNA
atgagcaaactggaaaagttcaccaactgttatagcctgagcaaaaccctgcgttttaaagcaattccggttggtaaaacccaagagaacattgataataaacgcctgctggtcgaagatgaaaaacgcgctgaagattataaaggcgtgaaaaaactgctggatcgctattatctgagcttcattaacgatgtgctgcacagcattaaactgaagaacctgaacaactatatcagcctgtttcgtaaaaaaacccgcaccgaaaaagaaaacaaagagctggaaaacctggaaatcaatctgcgtaaagaaatcgccaaagcgtttaaaggtaacgagggttataaaagcctgttcaagaaagacatcatcgaaaccattctgccggaatttctggatgataaagatgaaattgccctggtgaatagctttaatggctttaccaccgcatttaccggcttttttgataatcgcgaaaacatgttcagcgaagaagcaaaaagcaccagcattgcatttcgctgcattaatgaaaatctgacccgctacattagcaacatggatatctttgaaaaagtggacgcgatcttcgataaacacgaagtgcaagagatcaaagagaaaatcctgaacagcgattatgacgtcgaagatttttttgaaggcgagttctttaacttcgttctgacccaagaaggtatcgacgtttataacgcaattattggtggttttgttaccgaaagcggtgagaaaatcaaaggcctgaatgaatatatcaacctgtataaccagaaaaccaaacagaaactgccgaaattcaaaccgctgtataaacaggttctgagcgatcgtgaaagcctgagcttttatggtgaaggttataccagtgatgaagaggttctggaagtttttcgtaacaccctgaataaaaacagcgagatctttagcagcatcaaaaagcttgagaaactgttcaaaaactttgatgagtatagcagcgcaggcatctttgttaaaaatggtccggcaattagcaccatcagcaaagatatttttggcgaatggaatgtgatccgcgataaatggaatgccgaatatgatgatatccacctgaaaaaaaaggccgtggtgaccgagaaatatgaagatgatcgtcgtaaaagcttcaagaaaattggtagctttagcctggaacagctgcaagaatatgcagatgcagatctgagcgttgtggaaaaactgaaagaaatcatcattcagaaggtggacgagatctataaagtttatggtagcagcgaaaaactgttcgatgcagattttgttctggaaaaaagcctgaaaaagaatgatgccgttgtggccattatgaaagatctgctggatagcgttaagagcttcgagaattacatcaaagccttttttggtgagggcaaagaaaccaatcgtgatgaaagtttctatggcgattttgtgctggcctatgatattctgctgaaagtggaccatatttatgatgccattcgcaattatgttacccagaaaccgtatagcaaagacaagttcaaactgtactttcagaacccgcagtttatgggtggttgggataaagataaagaaaccgattatcgtgccaccatcctgcgttatggtagtaaatactatctggccatcatggacaaaaaatacgcaaaatgcctgcagaaaatcgacaaagatgatgtgaatggcaactatgaaaaaatcaactacaaactgctgcctggtccgaataaaatgctgccgaaagtgttctttagcaagaaatggatggcctattataacccgagcgaggatattcaaaagatctacaaaaatggcacctttaaaaagggcgacatgttcaatctgaacgattgccacaaactgatcgatttcttcaaagattcaatttcgcgttatccgaaatggtccaatgcctatgattttaactttagcgaaaccgaaaaatacaaagacattgccggtttttatcgcgaagtggaagaacagggctataaagtgagctttgaaagcgcaagcaaaaaagaggttgataagctggttgaagagggcaaactgtatatgttccagatttacaacaaagattttagcgacaaaagccatggcaccccgaatctgcataccatgtactttaaactgctgttcgacgaaaataaccatggtcagattcgtctgagcggtggtgccgaactgtttatgcgtcgtgcaagtctgaaaaaagaagaactggttgttcatccggcaaatagcccgattgcaaacaaaaatccggacaatccgaaaaaaaccacgacactgagctatgatgtgtataaagacaaacgttttagcgaggatcagtatctgctgcatatcccgattgccatcaataaatgcccgaaaaacatctttaagatcaacaccgaagttcgcgtgctgctgaaacatgatgataatccgtatgtgattggcattgatcgtggtgaacgtaacctgctgtatattgttgttgttgatggtaaaggcaacatcgtggaacagtatagtctgaacgaaattatcaacaactttaacggcatccgcatcaaaaccgactatcatagcctgctggacaagaaagaaaaagaacgttttgaagcacgtcagaactggaccagtattgaaaacatcaaagaactgaaagccggttatattagccaggtggttcataaaatctgtgagctggtagaaaaatacgatgcagttattgcactggaagatctgaatagcggtttcaaaaatagccgtgtgaaagtcgaaaaacaggtgtatcagaaattcgagaaaatgctgatcgacaaactgaactacatggtcgacaaaaaaagcaatccgtgtgcaaccggtggtgcactgaaaggttatcagattaccaacaaatttgaaagctttaaaagcatgagcacccagaacggctttatcttctatattccggcatggctgaccagcaaaattgatccgagcaccggttttgtgaacctgctgaaaacaaaatatacctccattgccgacagcaagaagtttattagcagctttgatcgcattatgtatgttccggaagaggacctgtttgaattcgcactggattacaaaaatttcagccgtaccgatgccgactacatcaaaaaatggaaactgtacagctatggtaaccgcattcgcatttttcgcaacccgaagaaaaacaatgtgttcgattgggaagaagtttgtctgaccagcgcatataaagaacttttcaacaaatacggcatcaactatcagcagggtgatattcgtgcactgctgtgtgaacagagcgataaagcgttttatagcagttttatggcactgatgagcctgatgctgcagatgcgtaatagcattaccggtcgcaccgatgtggattttctgattagtccggtgaaaaattccgatggcatcttttatgatagccgcaattacgaagcacaagaaaatgcaattctgccgaaaaacgcagatgcaaatggtgcatataacattgcacgtaaagttctgtgggcaattggccagtttaagaaagcagaagatgagaagctggacaaagtgaaaattgcgatcagcaataaagagtggctggaatacgcacagaccagcgttaaacatgctcctgcgccagctcctgcacctgcgatggttagcaaaggtgaagaactgtttaccggcgttgtgccgattctggtggaactggatggtgatgtgaatggccataaatttagcgttagcggcgaaggcgaaggtgatgcgacctatggtaaactgaccctgaaatttatttgcaccaccggtaaactgccggttccgtggccgaccctggtgaccaccctgacctatggcgttcagtgctttagccgctatccggatcatatgaaacagcatgatttctttaaaagcgcgatgccggaaggctatgtgcaggaacgtaccatttttttcaaagatgatggcaactataaaacccgtgcggaagttaaatttgaaggcgataccctggtgaaccgcattgaactgaaaggtattgattttaaagaagatggcaacattctgggtcataaactggaatataattacaacagccataatgtgtatattatggccgataaacagaaaaatggcatcaaagtgaactttaaaatccgtcacaacattgaagatggtagcgtgcagctggcggatcattatcagcagaataccccgattggtgatggcccggtgctgctgccggataatcattatctgagcacccagagcgcgctgagcaaagatccgaatgaaaaacgtgatcatatggtgctgctggaatttgttaccgccgcgggcattaccctgggtatggatgaactgtataaa

SEQ ID NO: 399 - DNA, 4434 bp, synthetic construct
  misc_feature 1..4434: note = SYNTHETIC
  source 1..4434: mol_type = other DNA
atgagcaaactggaaaagttcaccaactgttatagcctgagcaaaaccctgcgttttaaagcaattccggttggtaaaacccaagagaacattgataataaacgcctgctggtcgaagatgaaaaacgcgctgaagattataaaggcgtgaaaaaactgctggatcgctattatctgagcttcattaacgatgtgctgcacagcattaaactgaagaacctgaacaactatatcagcctgtttcgtaaaaaaacccgcaccgaaaaagaaaacaaagagctggaaaacctggaaatcaatctgcgtaaagaaatcgccaaagcgtttaaaggtaacgagggttataaaagcctgttcaagaaagacatcatcgaaaccattctgccggaatttctggatgataaagatgaaattgccctggtgaatagctttaatggctttaccaccgcatttaccggcttttttgataatcgcgaaaacatgttcagcgaagaagcaaaaagcaccagcattgcatttcgctgcattaatgaaaatctgacccgctacattagcaacatggatatctttgaaaaagtggacgcgatcttcgataaacacgaagtgcaagagatcaaagagaaaatcctgaacagcgattatgacgtcgaagatttttttgaaggcgagttctttaacttcgttctgacccaagaaggtatcgacgtttataacgcaattattggtggttttgttaccgaaagcggtgagaaaatcaaaggcctgaatgaatatatcaacctgtataaccagaaaaccaaacagaaactgccgaaattcaaaccgctgtataaacaggttctgagcgatcgtgaaagcctgagcttttatggtgaaggttataccagtgatgaagaggttctggaagtttttcgtaacaccctgaataaaaacagcgagatctttagcagcatcaaaaagcttgagaaactgttcaaaaactttgatgagtatagcagcgcaggcatctttgttaaaaatggtccggcaattagcaccatcagcaaagatatttttggcgaatggaatgtgatccgcgataaatggaatgccgaatatgatgatatccacctgaaaaaaaaggccgtggtgaccgagaaatatgaagatgatcgtcgtaaaagcttcaagaaaattggtagctttagcctggaacagctgcaagaatatgcagatgcagatctgagcgttgtggaaaaactgaaagaaatcatcattcagaaggtggacgagatctataaagtttatggtagcagcgaaaaactgttcgatgcagattttgttctggaaaaaagcctgaaaaagaatgatgccgttgtggccattatgaaagatctgctggatagcgttaagagcttcgagaattacatcaaagccttttttggtgagggcaaagaaaccaatcgtgatgaaagtttctatggcgattttgtgctggcctatgatattctgctgaaagtggaccatatttatgatgccattcgcaattatgttacccagaaaccgtatagcaaagacaagttcaaactgtactttcagaacccgcagtttatgggtggttgggataaagataaagaaaccgattatcgtgccaccatcctgcgttatggtagtaaatactatctggccatcatggacaaaaaatacgcaaaatgcctgcagaaaatcgacaaagatgatgtgaatggcaactatgaaaaaatcaactacaaactgctgcctggtccgaataaaatgctgccgaaagtgttctttagcaagaaatggatggcctattataacccgagcgaggatattcaaaagatctacaaaaatggcacctttaaaaagggcgacatgttcaatctgaacgattgccacaaactgatcgatttcttcaaagattcaatttcgcgttatccgaaatggtccaatgcctatgattttaactttagcgaaaccgaaaaatacaaagacattgccggtttttatcgcgaagtggaagaacagggctataaagtgagctttgaaagcgcaagcaaaaaagaggttgataagctggttgaagagggcaaactgtatatgttccagatttacaacaaagattttagcgacaaaagccatggcaccccgaatctgcataccatgtactttaaactgctgttcgacgaaaataaccatggtcagattcgtctgagcggtggtgccgaactgtttatgcgtcgtgcaagtctgaaaaaagaagaactggttgttcatccggcaaatagcccgattgcaaacaaaaatccggacaatccgaaaaaaaccacgacactgagctatgatgtgtataaagacaaacgttttagcgaggatcagtatctgctgcatatcccgattgccatcaataaatgcccgaaaaacatctttaagatcaacaccgaagttcgcgtgctgctgaaacatgatgataatccgtatgtgattggcattgatcgtggtgaacgtaacctgctgtatattgttgttgttgatggtaaaggcaacatcgtggaacagtatagtctgaacgaaattatcaacaactttaacggcatccgcatcaaaaccgactatcatagcctgctggacaagaaagaaaaagaacgttttgaagcacgtcagaactggaccagtattgaaaacatcaaagaactgaaagccggttatattagccaggtggttcataaaatctgtgagctggtagaaaaatacgatgcagttattgcactggaagatctgaatagcggtttcaaaaatagccgtgtgaaagtcgaaaaacaggtgtatcagaaattcgagaaaatgctgatcgacaaactgaactacatggtcgacaaaaaaagcaatccgtgtgcaaccggtggtgcactgaaaggttatcagattaccaacaaatttgaaagctttaaaagcatgagcacccagaacggctttatcttctatattccggcatggctgaccagcaaaattgatccgagcaccggttttgtgaacctgctgaaaacaaaatatacctccattgccgacagcaagaagtttattagcagctttgatcgcattatgtatgttccggaagaggacctgtttgaattcgcactggattacaaaaatttcagccgtaccgatgccgactacatcaaaaaatggaaactgtacagctatggtaaccgcattcgcatttttcgcaacccgaagaaaaacaatgtgttcgattgggaagaagtttgtctgaccagcgcatataaagaacttttcaacaaatacggcatcaactatcagcagggtgatattcgtgcactgctgtgtgaacagagcgataaagcgttttatagcagttttatggcactgatgagcctgatgctgcagatgcgtaatagcattaccggtcgcaccgatgtggattttctgattagtccggtgaaaaattccgatggcatcttttatgatagccgcaattacgaagcacaagaaaatgcaattctgccgaaaaacgcagatgcaaatggtgcatataacattgcacgtaaagttctgtgggcaattggccagtttaagaaagcagaagatgagaagctggacaaagtgaaaattgcgatcagcaataaagagtggctggaatacgcacagaccagcgttaaacatgcgcccgctcctgcgccagctcctgcacctgcgatggttagcaaaggtgaagaactgtttaccggcgttgtgccgattctggtggaactggatggtgatgtgaatggccataaatttagcgttagcggcgaaggcgaaggtgatgcgacctatggtaaactgaccctgaaatttatttgcaccaccggtaaactgccggttccgtggccgaccctggtgaccaccctgacctatggcgttcagtgctttagccgctatccggatcatatgaaacagcatgatttctttaaaagcgcgatgccggaaggctatgtgcaggaacgtaccatttttttcaaagatgatggcaactataaaacccgtgcggaagttaaatttgaaggcgataccctggtgaaccgcattgaactgaaaggtattgattttaaagaagatggcaacattctgggtcataaactggaatataattacaacagccataatgtgtatattatggccgataaacagaaaaatggcatcaaagtgaactttaaaatccgtcacaacattgaagatggtagcgtgcagctggcggatcattatcagcagaataccccgattggtgatggcccggtgctgctgccggataatcattatctgagcacccagagcgcgctgagcaaagatccgaatgaaaaacgtgatcatatggtgctgctggaatttgttaccgccgcgggcattaccctgggtatggatgaactgtataaa

SEQ ID NO: 400 - DNA, 4440 bp, synthetic construct
  misc_feature 1..4440: note = SYNTHETIC
  source 1..4440: mol_type = other DNA
atgagcaaactggaaaagttcaccaactgttatagcctgagcaaaaccctgcgttttaaagcaattccggttggtaaaacccaagagaacattgataataaacgcctgctggtcgaagatgaaaaacgcgctgaagattataaaggcgtgaaaaaactgctggatcgctattatctgagcttcattaacgatgtgctgcacagcattaaactgaagaacctgaacaactatatcagcctgtttcgtaaaaaaacccgcaccgaaaaagaaaacaaagagctggaaaacctggaaatcaatctgcgtaaagaaatcgccaaagcgtttaaaggtaacgagggttataaaagcctgttcaagaaagacatcatcgaaaccattctgccggaatttctggatgataaagatgaaattgccctggtgaatagctttaatggctttaccaccgcatttaccggcttttttgataatcgcgaaaacatgttcagcgaagaagcaaaaagcaccagcattgcatttcgctgcattaatgaaaatctgacccgctacattagcaacatggatatctttgaaaaagtggacgcgatcttcgataaacacgaagtgcaagagatcaaagagaaaatcctgaacagcgattatgacgtcgaagatttttttgaaggcgagttctttaacttcgttctgacccaagaaggtatcgacgtttataacgcaattattggtggttttgttaccgaaagcggtgagaaaatcaaaggcctgaatgaatatatcaacctgtataaccagaaaaccaaacagaaactgccgaaattcaaaccgctgtataaacaggttctgagcgatcgtgaaagcctgagcttttatggtgaaggttataccagtgatgaagaggttctggaagtttttcgtaacaccctgaataaaaacagcgagatctttagcagcatcaaaaagcttgagaaactgttcaaaaactttgatgagtatagcagcgcaggcatctttgttaaaaatggtccggcaattagcaccatcagcaaagatatttttggcgaatggaatgtgatccgcgataaatggaatgccgaatatgatgatatccacctgaaaaaaaaggccgtggtgaccgagaaatatgaagatgatcgtcgtaaaagcttcaagaaaattggtagctttagcctggaacagctgcaagaatatgcagatgcagatctgagcgttgtggaaaaactgaaagaaatcatcattcagaaggtggacgagatctataaagtttatggtagcagcgaaaaactgttcgatgcagattttgttctggaaaaaagcctgaaaaagaatgatgccgttgtggccattatgaaagatctgctggatagcgttaagagcttcgagaattacatcaaagccttttttggtgagggcaaagaaaccaatcgtgatgaaagtttctatggcgattttgtgctggcctatgatattctgctgaaagtggaccatatttatgatgccattcgcaattatgttacccagaaaccgtatagcaaagacaagttcaaactgtactttcagaacccgcagtttatgggtggttgggataaagataaagaaaccgattatcgtgccaccatcctgcgttatggtagtaaatactatctggccatcatggacaaaaaatacgcaaaatgcctgcagaaaatcgacaaagatgatgtgaatggcaactatgaaaaaatcaactacaaactgctgcctggtccgaataaaatgctgccgaaagtgttctttagcaagaaatggatggcctattataacccgagcgaggatattcaaaagatctacaaaaatggcacctttaaaaagggcgacatgttcaatctgaacgattgccacaaactgatcgatttcttcaaagattcaatttcgcgttatccgaaatggtccaatgcctatgattttaactttagcgaaaccgaaaaatacaaagacattgccggtttttatcgcgaagtggaagaacagggctataaagtgagctttgaaagcgcaagcaaaaaagaggttgataagctggttgaagagggcaaactgtatatgttccagatttacaacaaagattttagcgacaaaagccatggcaccccgaatctgcataccatgtactttaaactgctgttcgacgaaaataaccatggtcagattcgtctgagcggtggtgccgaactgtttatgcgtcgtgcaagtctgaaaaaagaagaactggttgttcatccggcaaatagcccgattgcaaacaaaaatccggacaatccgaaaaaaaccacgacactgagctatgatgtgtataaagacaaacgttttagcgaggatcagtatctgctgcatatcccgattgccatcaataaatgcccgaaaaacatctttaagatcaacaccgaagttcgcgtgctgctgaaacatgatgataatccgtatgtgattggcattgatcgtggtgaacgtaacctgctgtatattgttgttgttgatggtaaaggcaacatcgtggaacagtatagtctgaacgaaattatcaacaactttaacggcatccgcatcaaaaccgactatcatagcctgctggacaagaaagaaaaagaacgttttgaagcacgtcagaactggaccagtattgaaaacatcaaagaactgaaagccggttatattagccaggtggttcataaaatctgtgagctggtagaaaaatacgatgcagttattgcactggaagatctgaatagcggtttcaaaaatagccgtgtgaaagtcgaaaaacaggtgtatcagaaattcgagaaaatgctgatcgacaaactgaactacatggtcgacaaaaaaagcaatccgtgtgcaaccggtggtgcactgaaaggttatcagattaccaacaaatttgaaagctttaaaagcatgagcacccagaacggctttatcttctatattccggcatggctgaccagcaaaattgatccgagcaccggttttgtgaacctgctgaaaacaaaatatacctccattgccgacagcaagaagtttattagcagctttgatcgcattatgtatgttccggaagaggacctgtttgaattcgcactggattacaaaaatttcagccgtaccgatgccgactacatcaaaaaatggaaactgtacagctatggtaaccgcattcgcatttttcgcaacccgaagaaaaacaatgtgttcgattgggaagaagtttgtctgaccagcgcatataaagaacttttcaacaaatacggcatcaactatcagcagggtgatattcgtgcactgctgtgtgaacagagcgataaagcgttttatagcagttttatggcactgatgagcctgatgctgcagatgcgtaatagcattaccggtcgcaccgatgtggattttctgattagtccggtgaaaaattccgatggcatcttttatgatagccgcaattacgaagcacaagaaaatgcaattctgccgaaaaacgcagatgcaaatggtgcatataacattgcacgtaaagttctgtgggcaattggccagtttaagaaagcagaagatgagaagctggacaaagtgaaaattgcgatcagcaataaagagtggctggaatacgcacagaccagcgttaaacatgcgccagcgcctgctcctgcacccgctccagcacctgcgatggttagcaaaggtgaagaactgtttaccggcgttgtgccgattctggtggaactggatggtgatgtgaatggccataaatttagcgttagcggcgaaggcgaaggtgatgcgacctatggtaaactgaccctgaaatttatttgcaccaccggtaaactgccggttccgtggccgaccctggtgaccaccctgacctatggcgttcagtgctttagccgctatccggatcatatgaaacagcatgatttctttaaaagcgcgatgccggaaggctatgtgcaggaacgtaccatttttttcaaagatgatggcaactataaaacccgtgcggaagttaaatttgaaggcgataccctggtgaaccgcattgaactgaaaggtattgattttaaagaagatggcaacattctgggtcataaactggaatataattacaacagccataatgtgtatattatggccgataaacagaaaaatggcatcaaagtgaactttaaaatccgtcacaacattgaagatggtagcgtgcagctggcggatcattatcagcagaataccccgattggtgatggcccggtgctgctgccggataatcattatctgagcacccagagcgcgctgagcaaagatccgaatgaaaaacgtgatcatatggtgctgctggaatttgttaccgccgcgggcattaccctgggtatggatgaactgtataaa

SEQ ID NO: 401 - DNA, 4446 bp, synthetic construct
  misc_feature 1..4446: note = SYNTHETIC
  source 1..4446: mol_type = other DNA
atgagcaaactggaaaagttcaccaactgttatagcctgagcaaaaccctgcgttttaaagcaattccggttggtaaaacccaagagaacattgataataaacgcctgctggtcgaagatgaaaaacgcgctgaagattataaaggcgtgaaaaaactgctggatcgctattatctgagcttcattaacgatgtgctgcacagcattaaactgaagaacctgaacaactatatcagcctgtttcgtaaaaaaacccgcaccgaaaaagaaaacaaagagctggaaaacctggaaatcaatctgcgtaaagaaatcgccaaagcgtttaaaggtaacgagggttataaaagcctgttcaagaaagacatcatcgaaaccattctgccggaatttctggatgataaagatgaaattgccctggtgaatagctttaatggctttaccaccgcatttaccggcttttttgataatcgcgaaaacatgttcagcgaagaagcaaaaagcaccagcattgcatttcgctgcattaatgaaaatctgacccgctacattagcaacatggatatctttgaaaaagtggacgcgatcttcgataaacacgaagtgcaagagatcaaagagaaaatcctgaacagcgattatgacgtcgaagatttttttgaaggcgagttctttaacttcgttctgacccaagaaggtatcgacgtttataacgcaattattggtggttttgttaccgaaagcggtgagaaaatcaaaggcctgaatgaatatatcaacctgtataaccagaaaaccaaacagaaactgccgaaattcaaaccgctgtataaacaggttctgagcgatcgtgaaagcctgagcttttatggtgaaggttataccagtgatgaagaggttctggaagtttttcgtaacaccctgaataaaaacagcgagatctttagcagcatcaaaaagcttgagaaactgttcaaaaactttgatgagtatagcagcgcaggcatctttgttaaaaatggtccggcaattagcaccatcagcaaagatatttttggcgaatggaatgtgatccgcgataaatggaatgccgaatatgatgatatccacctgaaaaaaaaggccgtggtgaccgagaaatatgaagatgatcgtcgtaaaagcttcaagaaaattggtagctttagcctggaacagctgcaagaatatgcagatgcagatctgagcgttgtggaaaaactgaaagaaatcatcattcagaaggtggacgagatctataaagtttatggtagcagcgaaaaactgttcgatgcagattttgttctggaaaaaagcctgaaaaagaatgatgccgttgtggccattatgaaagatctgctggatagcgttaagagcttcgagaattacatcaaagccttttttggtgagggcaaagaaaccaatcgtgatgaaagtttctatggcgattttgtgctggcctatgatattctgctgaaagtggaccatatttatgatgccattcgcaattatgttacccagaaaccgtatagcaaagacaagttcaaactgtactttcagaacccgcagtttatgggtggttgggataaagataaagaaaccgattatcgtgccaccatcctgcgttatggtagtaaatactatctggccatcatggacaaaaaatacgcaaaatgcctgcagaaaatcgacaaagatgatgtgaatggcaactatgaaaaaatcaactacaaactgctgcctggtccgaataaaatgctgccgaaagtgttctttagcaagaaatggatggcctattataacccgagcgaggatattcaaaagatctacaaaaatggcacctttaaaaagggcgacatgttcaatctgaacgattgccacaaactgatcgatttcttcaaagattcaatttcgcgttatccgaaatggtccaatgcctatgattttaactttagcgaaaccgaaaaatacaaagacattgccggtttttatcgcgaagtggaagaacagggctataaagtgagctttgaaagcgcaagcaaaaaagaggttgataagctggttgaagagggcaaactgtatatgttccagatttacaacaaagattttagcgacaaaagccatggcaccccgaatctgcataccatgtactttaaactgctgttcgacgaaaataaccatggtcagattcgtctgagcggtggtgccgaactgtttatgcgtcgtgcaagtctgaaaaaagaagaactggttgttcatccggcaaatagcccgattgcaaacaaaaatccggacaatccgaaaaaaaccacgacactgagctatgatgtgtataaagacaaacgttttagcgaggatcagtatctgctgcatatcccgattgccatcaataaatgcccgaaaaacatctttaagatcaacaccgaagttcgcgtgctgctgaaacatgatgataatccgtatgtgattggcattgatcgtggtgaacgtaacctgctgtatattgttgttgttgatggtaaaggcaacatcgtggaacagtatagtctgaacgaaattatcaacaactttaacggcatccgcatcaaaaccgactatcatagcctgctggacaagaaagaaaaagaacgttttgaagcacgtcagaactggaccagtattgaaaacatcaaagaactgaaagccggttatattagccaggtggttcataaaatctgtgagctggtagaaaaatacgatgcagttattgcactggaagatctgaatagcggtttcaaaaatagccgtgtgaaagtcgaaaaacaggtgtatcagaaattcgagaaaatgctgatcgacaaactgaactacatggtcgacaaaaaaagcaatccgtgtgcaaccggtggtgcactgaaaggttatcagattaccaacaaatttgaaagctttaaaagcatgagcacccagaacggctttatcttctatattccggcatggctgaccagcaaaattgatccgagcaccggttttgtgaacctgctgaaaacaaaatatacctccattgccgacagcaagaagtttattagcagctttgatcgcattatgtatgttccggaagaggacctgtttgaattcgcactggattacaaaaatttcagccgtaccgatgccgactacatcaaaaaatggaaactgtacagctatggtaaccgcattcgcatttttcgcaacccgaagaaaaacaatgtgttcgattgggaagaagtttgtctgaccagcgcatataaagaacttttcaacaaatacggcatcaactatcagcagggtgatattcgtgcactgctgtgtgaacagagcgataaagcgttttatagcagttttatggcactgatgagcctgatgctgcagatgcgtaatagcattaccggtcgcaccgatgtggattttctgattagtccggtgaaaaattccgatggcatcttttatgatagccgcaattacgaagcacaagaaaatgcaattctgccgaaaaacgcagatgcaaatggtgcatataacattgcacgtaaagttctgtgggcaattggccagtttaagaaagcagaagatgagaagctggacaaagtgaaaattgcgatcagcaataaagagtggctggaatacgcacagaccagcgttaaacatgcgccagcgcctgctcctgcacccgctccagctcctgccccagcgatggttagcaaaggtgaagaactgtttaccggcgttgtgccgattctggtggaactggatggtgatgtgaatggccataaatttagcgttagcggcgaaggcgaaggtgatgcgacctatggtaaactgaccctgaaatttatttgcaccaccggtaaactgccggttccgtggccgaccctggtgaccaccctgacctatggcgttcagtgctttagccgctatccggatcatatgaaacagcatgatttctttaaaagcgcgatgccggaaggctatgtgcaggaacgtaccatttttttcaaagatgatggcaactataaaacccgtgcggaagttaaatttgaaggcgataccctggtgaaccgcattgaactgaaaggtattgattttaaagaagatggcaacattctgggtcataaactggaatataattacaacagccataatgtgtatattatggccgataaacagaaaaatggcatcaaagtgaactttaaaatccgtcacaacattgaagatggtagcgtgcagctggcggatcattatcagcagaataccccgattggtgatggcccggtgctgctgccggataatcattatctgagcacccagagcgcgctgagcaaagatccgaatgaaaaacgtgatcatatggtgctgctggaatttgttaccgccgcgggcattaccctgggtatggatgaactgtataaa

SEQ ID NO: 402 - DNA, 4452 bp, synthetic construct
  misc_feature 1..4452: note = SYNTHETIC
  source 1..4452: mol_type = other DNA
atgagcaaactggaaaagttcaccaactgttatagcctgagcaaaaccctgcgttttaaagcaattccggttggtaaaacccaagagaacattgataataaacgcctgctggtcgaagatgaaaaacgcgctgaagattataaaggcgtgaaaaaactgctggatcgctattatctgagcttcattaacgatgtgctgcacagcattaaactgaagaacctgaacaactatatcagcctgtttcgtaaaaaaacccgcaccgaaaaagaaaacaaagagctggaaaacctggaaatcaatctgcgtaaagaaatcgccaaagcgtttaaaggtaacgagggttataaaagcctgttcaagaaagacatcatcgaaaccattctgccggaatttctggatgataaagatgaaattgccctggtgaatagctttaatggctttaccaccgcatttaccggcttttttgataatcgcgaaaacatgttcagcgaagaagcaaaaagcaccagcattgcatttcgctgcattaatgaaaatctgacccgctacattagcaacatggatatctttgaaaaagtggacgcgatcttcgataaacacgaagtgcaagagatcaaagagaaaatcctgaacagcgattatgacgtcgaagatttttttgaaggcgagttctttaacttcgttctgacccaagaaggtatcgacgtttataacgcaattattggtggttttgttaccgaaagcggtgagaaaatcaaaggcctgaatgaatatatcaacctgtataaccagaaaaccaaacagaaactgccgaaattcaaaccgctgtataaacaggttctgagcgatcgtgaaagcctgagcttttatggtgaaggttataccagtgatgaagaggttctggaagtttttcgtaacaccctgaataaaaacagcgagatctttagcagcatcaaaaagcttgagaaactgttcaaaaactttgatgagtatagcagcgcaggcatctttgttaaaaatggtccggcaattagcaccatcagcaaagatatttttggcgaatggaatgtgatccgcgataaatggaatgccgaatatgatgatatccacctgaaaaaaaaggccgtggtgaccgagaaatatgaagatgatcgtcgtaaaagcttcaagaaaattggtagctttagcctggaacagctgcaagaatatgcagatgcagatctgagcgttgtggaaaaactgaaagaaatcatcattcagaaggtggacgagatctataaagtttatggtagcagcgaaaaactgttcgatgcagattttgttctggaaaaaagcctgaaaaagaatgatgccgttgtggccattatgaaagatctgctggatagcgttaagagcttcgagaattacatcaaagccttttttggtgagggcaaagaaaccaatcgtgatgaaagtttctatggcgattttgtgctggcctatgatattctgctgaaagtggaccatatttatgatgccattcgcaattatgttacccagaaaccgtatagcaaagacaagttcaaactgtactttcagaacccgcagtttatgggtggttgggataaagataaagaaaccgattatcgtgccaccatcctgcgttatggtagtaaatactatctggccatcatggacaaaaaatacgcaaaatgcctgcagaaaatcgacaaagatgatgtgaatggcaactatgaaaaaatcaactacaaactgctgcctggtccgaataaaatgctgccgaaagtgttctttagcaagaaatggatggcctattataacccgagcgaggatattcaaaagatctacaaaaatggcacctttaaaaagggcgacatgttcaatctgaacgattgccacaaactgatcgatttcttcaaagattcaatttcgcgttatccgaaatggtccaatgcctatgattttaactttagcgaaaccgaaaaatacaaagacattgccggtttttatcgcgaagtggaagaacagggctataaagtgagctttgaaagcgcaagcaaaaaagaggttgataagctggttgaagagggcaaactgtatatgttccagatttacaacaaagattttagcgacaaaagccatggcaccccgaatctgcataccatgtactttaaactgctgttcgacgaaaataaccatggtcagattcgtctgagcggtggtgccgaactgtttatgcgtcgtgcaagtctgaaaaaagaagaactggttgttcatccggcaaatagcccgattgcaaacaaaaatccggacaatccgaaaaaaaccacgacactgagctatgatgtgtataaagacaaacgttttagcgaggatcagtatctgctgcatatcccgattgccatcaataaatgcccgaaaaacatctttaagatcaacaccgaagttcgcgtgctgctgaaacatgatgataatccgtatgtgattggcattgatcgtggtgaacgtaacctgctgtatattgttgttgttgatggtaaaggcaacatcgtggaacagtatagtctgaacgaaattatcaacaactttaacggcatccgcatcaaaaccgactatcatagcctgctggacaagaaagaaaaagaacgttttgaagcacgtcagaactggaccagtattgaaaacatcaaagaactgaaagccggttatattagccaggtggttcataaaatctgtgagctggtagaaaaatacgatgcagttattgcactggaagatctgaatagcggtttcaaaaatagccgtgtgaaagtcgaaaaacaggtgtatcagaaattcgagaaaatgctgatcgacaaactgaactacatggtcgacaaaaaaagcaatccgtgtgcaaccggtggtgcactgaaaggttatcagattaccaacaaatttgaaagctttaaaagcatgagcacccagaacggctttatcttctatattccggcatggctgaccagcaaaattgatccgagcaccggttttgtgaacctgctgaaaacaaaatatacctccattgccgacagcaagaagtttattagcagctttgatcgcattatgtatgttccggaagaggacctgtttgaattcgcactggattacaaaaatttcagccgtaccgatgccgactacatcaaaaaatggaaactgtacagctatggtaaccgcattcgcatttttcgcaacccgaagaaaaacaatgtgttcgattgggaagaagtttgtctgaccagcgcatataaagaacttttcaacaaatacggcatcaactatcagcagggtgatattcgtgcactgctgtgtgaacagagcgataaagcgttttatagcagttttatggcactgatgagcctgatgctgcagatgcgtaatagcattaccggtcgcaccgatgtggattttctgattagtccggtgaaaaattccgatggcatcttttatgatagccgcaattacgaagcacaagaaaatgcaattctgccgaaaaacgcagatgcaaatggtgcatataacattgcacgtaaagttctgtgggcaattggccagtttaagaaagcagaagatgagaagctggacaaagtgaaaattgcgatcagcaataaagagtggctggaatacgcacagaccagcgttaaacatgcgccagcgcctgctcctgcacccgctccagcgccagctcctgcacctgcgatggttagcaaaggtgaagaactgtttaccggcgttgtgccgattctggtggaactggatggtgatgtgaatggccataaatttagcgttagcggcgaaggcgaaggtgatgcgacctatggtaaactgaccctgaaatttatttgcaccaccggtaaactgccggttccgtggccgaccctggtgaccaccctgacctatggcgttcagtgctttagccgctatccggatcatatgaaacagcatgatttctttaaaagcgcgatgccggaaggctatgtgcaggaacgtaccatttttttcaaagatgatggcaactataaaacccgtgcggaagttaaatttgaaggcgataccctggtgaaccgcattgaactgaaaggtattgattttaaagaagatggcaacattctgggtcataaactggaatataattacaacagccataatgtgtatattatggccgataaacagaaaaatggcatcaaagtgaactttaaaatccgtcacaacattgaagatggtagcgtgcagctggcggatcattatcagcagaataccccgattggtgatggcccggtgctgctgccggataatcattatctgagcacccagagcgcgctgagcaaagatccgaatgaaaaacgtgatcatatggtgctgctggaatttgttaccgccgcgggcattaccctgggtatggatgaactgtataaa

SEQ ID NO: 403 - DNA, 4458 bp, synthetic construct
  misc_feature 1..4458: note = SYNTHETIC
  source 1..4458: mol_type = other DNA
atgagcaaactggaaaagttcaccaactgttatagcctgagcaaaaccctgcgttttaaagcaattccggttggtaaaacccaagagaacattgataataaacgcctgctggtcgaagatgaaaaacgcgctgaagattataaaggcgtgaaaaaactgctggatcgctattatctgagcttcattaacgatgtgctgcacagcattaaactgaagaacctgaacaactatatcagcctgtttcgtaaaaaaacccgcaccgaaaaagaaaacaaagagctggaaaacctggaaatcaatctgcgtaaagaaatcgccaaagcgtttaaaggtaacgagggttataaaagcctgttcaagaaagacatcatcgaaaccattctgccggaatttctggatgataaagatgaaattgccctggtgaatagctttaatggctttaccaccgcatttaccggcttttttgataatcgcgaaaacatgttcagcgaagaagcaaaaagcaccagcattgcatttcgctgcattaatgaaaatctgacccgctacattagcaacatggatatctttgaaaaagtggacgcgatcttcgataaacacgaagtgcaagagatcaaagagaaaatcctgaacagcgattatgacgtcgaagatttttttgaaggcgagttctttaacttcgttctgacccaagaaggtatcgacgtttataacgcaattattggtggttttgttaccgaaagcggtgagaaaatcaaaggcctgaatgaatatatcaacctgtataaccagaaaaccaaacagaaactgccgaaattcaaaccgctgtataaacaggttctgagcgatcgtgaaagcctgagcttttatggtgaaggttataccagtgatgaagaggttctggaagtttttcgtaacaccctgaataaaaacagcgagatctttagcagcatcaaaaagcttgagaaactgttcaaaaactttgatgagtatagcagcgcaggcatctttgttaaaaatggtccggcaattagcaccatcagcaaagatatttttggcgaatggaatgtgatccgcgataaatggaatgccgaatatgatgatatccacctgaaaaaaaaggccgtggtgaccgagaaatatgaagatgatcgtcgtaaaagcttcaagaaaattggtagctttagcctggaacagctgcaagaatatgcagatgcagatctgagcgttgtggaaaaactgaaagaaatcatcattcagaaggtggacgagatctataaagtttatggtagcagcgaaaaactgttcgatgcagattttgttctggaaaaaagcctgaaaaagaatgatgccgttgtggccattatgaaagatctgctggatagcgttaagagcttcgagaattacatcaaagccttttttggtgagggcaaagaaaccaatcgtgatgaaagtttctatggcgattttgtgctggcctatgatattctgctgaaagtggaccatatttatgatgccattcgcaattatgttacccagaaaccgtatagcaaagacaagttcaaactgtactttcagaacccgcagtttatgggtggttgggataaagataaagaaaccgattatcgtgccaccatcctgcgttatggtagtaaatactatctggccatcatggacaaaaaatacgcaaaatgcctgcagaaaatcgacaaagatgatgtgaatggcaactatgaaaaaatcaactacaaactgctgcctggtccgaataaaatgctgccgaaagtgttctttagcaagaaatggatggcctattataacccgagcgaggatattcaaaagatctacaaaaatggcacctttaaaaagggcgacatgttcaatctgaacgattgccacaaactgatcgatttcttcaaagattcaatttcgcgttatccgaaatggtccaatgcctatgattttaactttagcgaaaccgaaaaatacaaagacattgccggtttttatcgcgaagtggaagaacagggctataaagtgagctttgaaagcgcaagcaaaaaagaggttgataagctggttgaagagggcaaactgtatatgttccagatttacaacaaagattttagcgacaaaagccatggcaccccgaatctgcataccatgtactttaaactgctgttcgacgaaaataaccatggtcagattcgtctgagcggtggtgccgaactgtttatgcgtcgtgcaagtctgaaaaaagaagaactggttgttcatccggcaaatagcccgattgcaaacaaaaatccggacaatccgaaaaaaaccacgacactgagctatgatgtgtataaagacaaacgttttagcgaggatcagtatctgctgcatatcccgattgccatcaataaatgcccgaaaaacatctttaagatcaacaccgaagttcgcgtgctgctgaaacatgatgataatccgtatgtgattggcattgatcgtggtgaacgtaacctgctgtatattgttgttgttgatggtaaaggcaacatcgtggaacagtatagtctgaacgaaattatcaacaactttaacggcatccgcatcaaaaccgactatcatagcctgctggacaagaaagaaaaagaacgttttgaagcacgtcagaactggaccagtattgaaaacatcaaagaactgaaagccggttatattagccaggtggttcataaaatctgtgagctggtagaaaaatacgatgcagttattgcactggaagatctgaatagcggtttcaaaaatagccgtgtgaaagtcgaaaaacaggtgtatcagaaattcgagaaaatgctgatcgacaaactgaactacatggtcgacaaaaaaagcaatccgtgtgcaaccggtggtgcactgaaaggttatcagattaccaacaaatttgaaagctttaaaagcatgagcacccagaacggctttatcttctatattccggcatggctgaccagcaaaattgatccgagcaccggttttgtgaacctgctgaaaacaaaatatacctccattgccgacagcaagaagtttattagcagctttgatcgcattatgtatgttccggaagaggacctgtttgaattcgcactggattacaaaaatttcagccgtaccgatgccgactacatcaaaaaatggaaactgtacagctatggtaaccgcattcgcatttttcgcaacccgaagaaaaacaatgtgttcgattgggaagaagtttgtctgaccagcgcatataaagaacttttcaacaaatacggcatcaactatcagcagggtgatattcgtgcactgctgtgtgaacagagcgataaagcgttttatagcagttttatggcactgatgagcctgatgctgcagatgcgtaatagcattaccggtcgcaccgatgtggattttctgattagtccggtgaaaaattccgatggcatcttttatgatagccgcaattacgaagcacaagaaaatgcaattctgccgaaaaacgcagatgcaaatggtgcatataacattgcacgtaaagttctgtgggcaattggccagtttaagaaagcagaagatgagaagctggacaaagtgaaaattgcgatcagcaataaagagtggctggaatacgcacagaccagcgttaaacatgcgccagcgcctgctcctgcacccgctccagctcctgcgccagctcctgcacctgcgatggttagcaaaggtgaagaactgtttaccggcgttgtgccgattctggtggaactggatggtgatgtgaatggccataaatttagcgttagcggcgaaggcgaaggtgatgcgacctatggtaaactgaccctgaaatttatttgcaccaccggtaaactgccggttccgtggccgaccctggtgaccaccctgacctatggcgttcagtgctttagccgctatccggatcatatgaaacagcatgatttctttaaaagcgcgatgccggaaggctatgtgcaggaacgtaccatttttttcaaagatgatggcaactataaaacccgtgcggaagttaaatttgaaggcgataccctggtgaaccgcattgaactgaaaggtattgattttaaagaagatggcaacattctgggtcataaactggaatataattacaacagccataatgtgtatattatggccgataaacagaaaaatggcatcaaagtgaactttaaaatccgtcacaacattgaagatggtagcgtgcagctggcggatcattatcagcagaataccccgattggtgatggcccggtgctgctgccggataatcattatctgagcacccagagcgcgctgagcaaagatccgaatgaaaaacgtgatcatatggtgctgctggaatttgttaccgccgcgggcattaccctgggtatggatgaactgtataaa

SEQ ID NO: 404 - DNA, 4464 bp, synthetic construct
  misc_feature 1..4464: note = SYNTHETIC
  source 1..4464: mol_type = other DNA
atgagcaaactggaaaagttcaccaactgttatagcctgagcaaaaccctgcgttttaaagcaattccggttggtaaaacccaagagaacattgataataaacgcctgctggtcgaagatgaaaaacgcgctgaagattataaaggcgtgaaaaaactgctggatcgctattatctgagcttcattaacgatgtgctgcacagcattaaactgaagaacctgaacaactatatcagcctgtttcgtaaaaaaacccgcaccgaaaaagaaaacaaagagctggaaaacctggaaatcaatctgcgtaaagaaatcgccaaagcgtttaaaggtaacgagggttataaaagcctgttcaagaaagacatcatcgaaaccattctgccggaatttctggatgataaagatgaaattgccctggtgaatagctttaatggctttaccaccgcatttaccggcttttttgataatcgcgaaaacatgttcagcgaagaagcaaaaagcaccagcattgcatttcgctgcattaatgaaaatctgacccgctacattagcaacatggatatctttgaaaaagtggacgcgatcttcgataaacacgaagtgcaagagatcaaagagaaaatcctgaacagcgattatgacgtcgaagatttttttgaaggcgagttctttaacttcgttctgacccaagaaggtatcgacgtttataacgcaattattggtggttttgttaccgaaagcggtgagaaaatcaaaggcctgaatgaatatatcaacctgtataaccagaaaaccaaacagaaactgccgaaattcaaaccgctgtataaacaggttctgagcgatcgtgaaagcctgagcttttatggtgaaggttataccagtgatgaagaggttctggaagtttttcgtaacaccctgaataaaaacagcgagatctttagcagcatcaaaaagcttgagaaactgttcaaaaactttgatgagtatagcagcgcaggcatctttgttaaaaatggtccggcaattagcaccatcagcaaagatatttttggcgaatggaatgtgatccgcgataaatggaatgccgaatatgatgatatccacctgaaaaaaaaggccgtggtgaccgagaaatatgaagatgatcgtcgtaaaagcttcaagaaaattggtagctttagcctggaacagctgcaagaatatgcagatgcagatctgagcgttgtggaaaaactgaaagaaatcatcattcagaaggtggacgagatctataaagtttatggtagcagcgaaaaactgttcgatgcagattttgttctggaaaaaagcctgaaaaagaatgatgccgttgtggccattatgaaagatctgctggatagcgttaagagcttcgagaattacatcaaagccttttttggtgagggcaaagaaaccaatcgtgatgaaagtttctatggcgattttgtgctggcctatgatattctgctgaaagtggaccatatttatgatgccattcgcaattatgttacccagaaaccgtatagcaaagacaagttcaaactgtactttcagaacccgcagtttatgggtggttgggataaagataaagaaaccgattatcgtgccaccatcctgcgttatggtagtaaatactatctggccatcatggacaaaaaatacgcaaaatgcctgcagaaaatcgacaaagatgatgtgaatggcaactatgaaaaaatcaactacaaactgctgcctggtccgaataaaatgctgccgaaagtgttctttagcaagaaatggatggcctattataacccgagcgaggatattcaaaagatctacaaaaatggcacctttaaaaagggcgacatgttcaatctgaacgattgccacaaactgatcgatttcttcaaagattcaatttcgcgttatccgaaatggtccaatgcctatgattttaactttagcgaaaccgaaaaatacaaagacattgccggtttttatcgcgaagtggaagaacagggctataaagtgagctttgaaagcgcaagcaaaaaagaggttgataagctggttgaagagggcaaactgtatatgttccagatttacaacaaagattttagcgacaaaagccatggcaccccgaatctgcataccatgtactttaaactgctgttcgacgaaaataaccatggtcagattcgtctgagcggtggtgccgaactgtttatgcgtcgtgcaagtctgaaaaaagaagaactggttgttcatccggcaaatagcccgattgcaaacaaaaatccggacaatccgaaaaaaaccacgacactgagctatgatgtgtataaagacaaacgttttagcgaggatcagtatctgctgcatatcccgattgccatcaataaatgcccgaaaaacatctttaagatcaacaccgaagttcgcgtgctgctgaaacatgatgataatccgtatgtgattggcattgatcgtggtgaacgtaacctgctgtatattgttgttgttgatggtaaaggcaacatcgtggaacagtatagtctgaacgaaattatcaacaactttaacggcatccgcatcaaaaccgactatcatagcctgctggacaagaaagaaaaagaacgttttgaagcacgtcagaactggaccagtattgaaaacatcaaagaactgaaagccggttatattagccaggtggttcataaaatctgtgagctggtagaaaaatacgatgcagttattgcactggaagatctgaatagcggtttcaaaaatagccgtgtgaaagtcgaaaaacaggtgtatcagaaattcgagaaaatgctgatcgacaaactgaactacatggtcgacaaaaaaagcaatccgtgtgcaaccggtggtgcactgaaaggttatcagattaccaacaaatttgaaagctttaaaagcatgagcacccagaacggctttatcttctatattccggcatggctgaccagcaaaattgatccgagcaccggttttgtgaacctgctgaaaacaaaatatacctccattgccgacagcaagaagtttattagcagctttgatcgcattatgtatgttccggaagaggacctgtttgaattcgcactggattacaaaaatttcagccgtaccgatgccgactacatcaaaaaatggaaactgtacagctatggtaaccgcattcgcatttttcgcaacccgaagaaaaacaatgtgttcgattgggaagaagtttgtctgaccagcgcatataaagaacttttcaacaaatacggcatcaactatcagcagggtgatattcgtgcactgctgtgtgaacagagcgataaagcgttttatagcagttttatggcactgatgagcctgatgctgcagatgcgtaatagcattaccggtcgcaccgatgtggattttctgattagtccggtgaaaaattccgatggcatcttttatgatagccgcaattacgaagcacaagaaaatgcaattctgccgaaaaacgcagatgcaaatggtgcatataacattgcacgtaaagttctgtgggcaattggccagtttaagaaagcagaagatgagaagctggacaaagtgaaaattgcgatcagcaataaagagtggctggaatacgcacagaccagcgttaaacatgcgccagcgcctgctcctgcacccgctccagctcctgctcctgcgccagctcctgcacctgcgatggttagcaaaggtgaagaactgtttaccggcgttgtgccgattctggtggaactggatggtgatgtgaatggccataaatttagcgttagcggcgaaggcgaaggtgatgcgacctatggtaaactgaccctgaaatttatttgcaccaccggtaaactgccggttccgtggccgaccctggtgaccaccctgacctatggcgttcagtgctttagccgctatccggatcatatgaaacagcatgatttctttaaaagcgcgatgccggaaggctatgtgcaggaacgtaccatttttttcaaagatgatggcaactataaaacccgtgcggaagttaaatttgaaggcgataccctggtgaaccgcattgaactgaaaggtattgattttaaagaagatggcaacattctgggtcataaactggaatataattacaacagccataatgtgtatattatggccgataaacagaaaaatggcatcaaagtgaactttaaaatccgtcacaacattgaagatggtagcgtgcagctggcggatcattatcagcagaataccccgattggtgatggcccggtgctgctgccggataatcattatctgagcacccagagcgcgctgagcaaagatccgaatgaaaaacgtgatcatatggtgctgctggaatttgttaccgccgcgggcattaccctgggtatggatgaactgtataaa

SEQ ID NO: 405 - DNA, 4470 bp, synthetic construct
  misc_feature 1..4470: note = SYNTHETIC
  source 1..4470: mol_type = other DNA
atgagcaaactggaaaagttcaccaactgttatagcctgagcaaaaccctgcgttttaaagcaattccggttggtaaaacccaagagaacattgataataaacgcctgctggtcgaagatgaaaaacgcgctgaagattataaaggcgtgaaaaaactgctggatcgctattatctgagcttcattaacgatgtgctgcacagcattaaactgaagaacctgaacaactatatcagcctgtttcgtaaaaaaacccgcaccgaaaaagaaaacaaagagctggaaaacctggaaatcaatctgcgtaaagaaatcgccaaagcgtttaaaggtaacgagggttataaaagcctgttcaagaaagacatcatcgaaaccattctgccggaatttctggatgataaagatgaaattgccctggtgaatagctttaatggctttaccaccgcatttaccggcttttttgataatcgcgaaaacatgttcagcgaagaagcaaaaagcaccagcattgcatttcgctgcattaatgaaaatctgacccgctacattagcaacatggatatctttgaaaaagtggacgcgatcttcgataaacacgaagtgcaagagatcaaagagaaaatcctgaacagcgattatgacgtcgaagatttttttgaaggcgagttctttaacttcgttctgacccaagaaggtatcgacgtttataacgcaattattggtggttttgttaccgaaagcggtgagaaaatcaaaggcctgaatgaatatatcaacctgtataaccagaaaaccaaacagaaactgccgaaattcaaaccgctgtataaacaggttctgagcgatcgtgaaagcctgagcttttatggtgaaggttataccagtgatgaagaggttctggaagtttttcgtaacaccctgaataaaaacagcgagatctttagcagcatcaaaaagcttgagaaactgttcaaaaactttgatgagtatagcagcgcaggcatctttgttaaaaatggtccggcaattagcaccatcagcaaagatatttttggcgaatggaatgtgatccgcgataaatggaatgccgaatatgatgatatccacctgaaaaaaaaggccgtggtgaccgagaaatatgaagatgatcgtcgtaaaagcttcaagaaaattggtagctttagcctggaacagctgcaagaatatgcagatgcagatctgagcgttgtggaaaaactgaaagaaatcatcattcagaaggtggacgagatctataaagtttatggtagcagcgaaaaactgttcgatgcagattttgttctggaaaaaagcctgaaaaagaatgatgccgttgtggccattatgaaagatctgctggatagcgttaagagcttcgagaattacatcaaagccttttttggtgagggcaaagaaaccaatcgtgatgaaagtttctatggcgattttgtgctggcctatgatattctgctgaaagtggaccatatttatgatgccattcgcaattatgttacccagaaaccgtatagcaaagacaagttcaaactgtactttcagaacccgcagtttatgggtggttgggataaagataaagaaaccgattatcgtgccaccatcctgcgttatggtagtaaatactatctggccatcatggacaaaaaatacgcaaaatgcctgcagaaaatcgacaaagatgatgtgaatggcaactatgaaaaaatcaactacaaactgctgcctggtccgaataaaatgctgccgaaagtgttctttagcaagaaatggatggcctattataacccgagcgaggatattcaaaagatctacaaaaatggcacctttaaaaagggcgacatgttcaatctgaacgattgccacaaactgatcgatttcttcaaagattcaatttcgcgttatccgaaatggtccaatgcctatgattttaactttagcgaaaccgaaaaatacaaagacattgccggtttttatcgcgaagtggaagaacagggctataaagtgagctttgaaagcgcaagcaaaaaagaggttgataagctggttgaagagggcaaactgtatatgttccagatttacaacaaagattttagcgacaaaagccatggcaccccgaatctgcataccatgtactttaaactgctgttcgacgaaaataaccatggtcagattcgtctgagcggtggtgccgaactgtttatgcgtcgtgcaagtctgaaaaaagaagaactggttgttcatccggcaaatagcccgattgcaaacaaaaatccggacaatccgaaaaaaaccacgacactgagctatgatgtgtataaagacaaacgttttagcgaggatcagtatctgctgcatatcccgattgccatcaataaatgcccgaaaaacatctttaagatcaacaccgaagttcgcgtgctgctgaaacatgatgataatccgtatgtgattggcattgatcgtggtgaacgtaacctgctgtatattgttgttgttgatggtaaaggcaacatcgtggaacagtatagtctgaacgaaattatcaacaactttaacggcatccgcatcaaaaccgactatcatagcctgctggacaagaaagaaaaagaacgttttgaagcacgtcagaactggaccagtattgaaaacatcaaagaactgaaagccggttatattagccaggtggttcataaaatctgtgagctggtagaaaaatacgatgcagttattgcactggaagatctgaatagcggtttcaaaaatagccgtgtgaaagtcgaaaaacaggtgtatcagaaattcgagaaaatgctgatcgacaaactgaactacatggtcgacaaaaaaagcaatccgtgtgcaaccggtggtgcactgaaaggttatcagattaccaacaaatttgaaagctttaaaagcatgagcacccagaacggctttatcttctatattccggcatggctgaccagcaaaattgatccgagcaccggttttgtgaacctgctgaaaacaaaatatacctccattgccgacagcaagaagtttattagcagctttgatcgcattatgtatgttccggaagaggacctgtttgaattcgcactggattacaaaaatttcagccgtaccgatgccgactacatcaaaaaatggaaactgtacagctatggtaaccgcattcgcatttttcgcaacccgaagaaaaacaatgtgttcgattgggaagaagtttgtctgaccagcgcatataaagaacttttcaacaaatacggcatcaactatcagcagggtgatattcgtgcactgctgtgtgaacagagcgataaagcgttttatagcagttttatggcactgatgagcctgatgctgcagatgcgtaatagcattaccggtcgcaccgatgtggattttctgattagtccggtgaaaaattccgatggcatcttttatgatagccgcaattacgaagcacaagaaaatgcaattctgccgaaaaacgcagatgcaaatggtgcatataacattgcacgtaaagttctgtgggcaattggccagtttaagaaagcagaagatgagaagctggacaaagtgaaaattgcgatcagcaataaagagtggctggaatacgcacagaccagcgttaaacatgcgccagcgcctgctcctgcacccgctccagctcctgccccagctccagcgcccgctcctgcacctgcgatggttagcaaaggtgaagaactgtttaccggcgttgtgccgattctggtggaactggatggtgatgtgaatggccataaatttagcgttagcggcgaaggcgaaggtgatgcgacctatggtaaactgaccctgaaatttatttgcaccaccggtaaactgccggttccgtggccgaccctggtgaccaccctgacctatggcgttcagtgctttagccgctatccggatcatatgaaacagcatgatttctttaaaagcgcgatgccggaaggctatgtgcaggaacgtaccatttttttcaaagatgatggcaactataaaacccgtgcggaagttaaatttgaaggcgataccctggtgaaccgcattgaactgaaaggtattgattttaaagaagatggcaacattctgggtcataaactggaatataattacaacagccataatgtgtatattatggccgataaacagaaaaatggcatcaaagtgaactttaaaatccgtcacaacattgaagatggtagcgtgcagctggcggatcattatcagcagaataccccgattggtgatggcccggtgctgctgccggataatcattatctgagcacccagagcgcgctgagcaaagatccgaatgaaaaacgtgatcatatggtgctgctggaatttgttaccgccgcgggcattaccctgggtatggatgaactgtataaa

SEQ ID NO: 406 - DNA, 4476 bp, synthetic construct
  misc_feature 1..4476: note = SYNTHETIC
  source 1..4476: mol_type = other DNA
atgagcaaactggaaaagttcaccaactgttatagcctgagcaaaaccctgcgttttaaagcaattccggttggtaaaacccaagagaacattgataataaacgcctgctggtcgaagatgaaaaacgcgctgaagattataaaggcgtgaaaaaactgctggatcgctattatctgagcttcattaacgatgtgctgcacagcattaaactgaagaacctgaacaactatatcagcctgtttcgtaaaaaaacccgcaccgaaaaagaaaacaaagagctggaaaacctggaaatcaatctgcgtaaagaaatcgccaaagcgtttaaaggtaacgagggttataaaagcctgttcaagaaagacatcatcgaaaccattctgccggaatttctggatgataaagatgaaattgccctggtgaatagctttaatggctttaccaccgcatttaccggcttttttgataatcgcgaaaacatgttcagcgaagaagcaaaaagcaccagcattgcatttcgctgcattaatgaaaatctgacccgctacattagcaacatggatatctttgaaaaagtggacgcgatcttcgataaacacgaagtgcaagagatcaaagagaaaatcctgaacagcgattatgacgtcgaagatttttttgaaggcgagttctttaacttcgttctgacccaagaaggtatcgacgtttataacgcaattattggtggttttgttaccgaaagcggtgagaaaatcaaaggcctgaatgaatatatcaacctgtataaccagaaaaccaaacagaaactgccgaaattcaaaccgctgtataaacaggttctgagcgatcgtgaaagcctgagcttttatggtgaaggttataccagtgatgaagaggttctggaagtttttcgtaacaccctgaataaaaacagcgagatctttagcagcatcaaaaagcttgagaaactgttcaaaaactttgatgagtatagcagcgcaggcatctttgttaaaaatggtccggcaattagcaccatcagcaaagatatttttggcgaatggaatgtgatccgcgataaatggaatgccgaatatgatgatatccacctgaaaaaaaaggccgtggtgaccgagaaatatgaagatgatcgtcgtaaaagcttcaagaaaattggtagctttagcctggaacagctgcaagaatatgcagatgcagatctgagcgttgtggaaaaactgaaagaaatcatcattcagaaggtggacgagatctataaagtttatggtagcagcgaaaaactgttcgatgcagattttgttctggaaaaaagcctgaaaaagaatgatgccgttgtggccattatgaaagatctgctggatagcgttaagagcttcgagaattacatcaaagccttttttggtgagggcaaagaaaccaatcgtgatgaaagtttctatggcgattttgtgctggcctatgatattctgctgaaagtggaccatatttatgatgccattcgcaattatgttacccagaaaccgtatagcaaagacaagttcaaactgtactttcagaacccgcagtttatgggtggttgggataaagataaagaaaccgattatcgtgccaccatcctgcgttatggtagtaaatactatctggccatcatggacaaaaaatacgcaaaatgcctgcagaaaatcgacaaagatgatgtgaatggcaactatgaaaaaatcaactacaaactgctgcctggtccgaataaaatgctgccgaaagtgttctttagcaagaaatggatggcctattataacccgagcgaggatattcaaaagatctacaaaaatggcacctttaaaaagggcgacatgttcaatctgaacgattgccacaaactgatcgatttcttcaaagattcaatttcgcgttatccgaaatggtccaatgcctatgattttaactttagcgaaaccgaaaaatacaaagacattgccggtttttatcgcgaagtggaagaacagggctataaagtgagctttgaaagcgcaagcaaaaaagaggttgataagctggttgaagagggcaaactgtatatgttccagatttacaacaaagattttagcgacaaaagccatggcaccccgaatctgcataccatgtactttaaactgctgttcgacgaaaataaccatggtcagattcgtctgagcggtggtgccgaactgtttatgcgtcgtgcaagtctgaaaaaagaagaactggttgttcatccggcaaatagcccgattgcaaacaaaaatccggacaatccgaaaaaaaccacgacactgagctatgatgtgtataaagacaaacgttttagcgaggatcagtatctgctgcatatcccgattgccatcaataaatgcccgaaaaacatctttaagatcaacaccgaagttcgcgtgctgctgaaacatgatgataatccgtatgtgattggcattgatcgtggtgaacgtaacctgctgtatattgttgttgttgatggtaaaggcaacatcgtggaacagtatagtctgaacgaaattatcaacaactttaacggcatccgcatcaaaaccgactatcatagcctgctggacaagaaagaaaaagaacgttttgaagcacgtcagaactggaccagtattgaaaacatcaaagaactgaaagccggttatattagccaggtggttcataaaatctgtgagctggtagaaaaatacgatgcagttattgcactggaagatctgaatagcggtttcaaaaatagccgtgtgaaagtcgaaaaacaggtgtatcagaaattcgagaaaatgctgatcgacaaactgaactacatggtcgacaaaaaaagcaatccgtgtgcaaccggtggtgcactgaaaggttatcagattaccaacaaatttgaaagctttaaaagcatgagcacccagaacggctttatcttctatattccggcatggctgaccagcaaaattgatccgagcaccggttttgtgaacctgctgaaaacaaaatatacctccattgccgacagcaagaagtttattagcagctttgatcgcattatgtatgttccggaagaggacctgtttgaattcgcactggattacaaaaatttcagccgtaccgatgccgactacatcaaaaaatggaaactgtacagctatggtaaccgcattcgcatttttcgcaacccgaagaaaaacaatgtgttcgattgggaagaagtttgtctgaccagcgcatataaagaacttttcaacaaatacggcatcaactatcagcagggtgatattcgtgcactgctgtgtgaacagagcgataaagcgttttatagcagttttatggcactgatgagcctgatgctgcagatgcgtaatagcattaccggtcgcaccgatgtggattttctgattagtccggtgaaaaattccgatggcatcttttatgatagccgcaattacgaagcacaagaaaatgcaattctgccgaaaaacgcagatgcaaatggtgcatataacattgcacgtaaagttctgtgggcaattggccagtttaagaaagcagaagatgagaagctggacaaagtgaaaattgcgatcagcaataaagagtggctggaatacgcacagaccagcgttaaacatgcgccagcgcctgctcctgcacccgctccagctcctgccccagctccagcgcccgctcctgctcctgcacctgcgatggttagcaaaggtgaagaactgtttaccggcgttgtgccgattctggtggaactggatggtgatgtgaatggccataaatttagcgttagcggcgaaggcgaaggtgatgcgacctatggtaaactgaccctgaaatttatttgcaccaccggtaaactgccggttccgtggccgaccctggtgaccaccctgacctatggcgttcagtgctttagccgctatccggatcatatgaaacagcatgatttctttaaaagcgcgatgccggaaggctatgtgcaggaacgtaccatttttttcaaagatgatggcaactataaaacccgtgcggaagttaaatttgaaggcgataccctggtgaaccgcattgaactgaaaggtattgattttaaagaagatggcaacattctgggtcataaactggaatataattacaacagccataatgtgtatattatggccgataaacagaaaaatggcatcaaagtgaactttaaaatccgtcacaacattgaagatggtagcgtgcagctggcggatcattatcagcagaataccccgattggtgatggcccggtgctgctgccggataatcattatctgagcacccagagcgcgctgagcaaagatccgaatgaaaaacgtgatcatatggtgctgctggaatttgttaccgccgcgggcattaccctgggtatggatgaactgtataaa

SEQ ID NO: 407 - DNA, 4482 bp, synthetic construct
  misc_feature 1..4482: note = SYNTHETIC
  source 1..4482: mol_type = other DNA
atgagcaaactggaaaagttcaccaactgttatagcctgagcaaaaccctgcgttttaaagcaattccggttggtaaaacccaagagaacattgataataaacgcctgctggtcgaagatgaaaaacgcgctgaagattataaaggcgtgaaaaaactgctggatcgctattatctgagcttcattaacgatgtgctgcacagcattaaactgaagaacctgaacaactatatcagcctgtttcgtaaaaaaacccgcaccgaaaaagaaaacaaagagctggaaaacctggaaatcaatctgcgtaaagaaatcgccaaagcgtttaaaggtaacgagggttataaaagcctgttcaagaaagacatcatcgaaaccattctgccggaatttctggatgataaagatgaaattgccctggtgaatagctttaatggctttaccaccgcatttaccggcttttttgataatcgcgaaaacatgttcagcgaagaagcaaaaagcaccagcattgcatttcgctgcattaatgaaaatctgacccgctacattagcaacatggatatctttgaaaaagtggacgcgatcttcgataaacacgaagtgcaagagatcaaagagaaaatcctgaacagcgattatgacgtcgaagatttttttgaaggcgagttctttaacttcgttctgacccaagaaggtatcgacgtttataacgcaattattggtggttttgttaccgaaagcggtgagaaaatcaaaggcctgaatgaatatatcaacctgtataaccagaaaaccaaacagaaactgccgaaattcaaaccgctgtataaacaggttctgagcgatcgtgaaagcctgagcttttatggtgaaggttataccagtgatgaagaggttctggaagtttttcgtaacaccctgaataaaaacagcgagatctttagcagcatcaaaaagcttgagaaactgttcaaaaactttgatgagtatagcagcgcaggcatctttgttaaaaatggtccggcaattagcaccatcagcaaagatatttttggcgaatggaatgtgatccgcgataaatggaatgccgaatatgatgatatccacctgaaaaaaaaggccgtggtgaccgagaaatatgaagatgatcgtcgtaaaagcttcaagaaaattggtagctttagcctggaacagctgcaagaatatgcagatgcagatctgagcgttgtggaaaaactgaaagaaatcatcattcagaaggtggacgagatctataaagtttatggtagcagcgaaaaactgttcgatgcagattttgttctggaaaaaagcctgaaaaagaatgatgccgttgtggccattatgaaagatctgctggatagcgttaagagcttcgagaattacatcaaagccttttttggtgagggcaaagaaaccaatcgtgatgaaagtttctatggcgattttgtgctggcctatgatattctgctgaaagtggaccatatttatgatgccattcgcaattatgttacccagaaaccgtatagcaaagacaagttcaaactgtactttcagaacccgcagtttatgggtggttgggataaagataaagaaaccgattatcgtgccaccatcctgcgttatggtagtaaatactatctggccatcatggacaaaaaatacgcaaaatgcctgcagaaaatcgacaaagatgatgtgaatggcaactatgaaaaaatcaactacaaactgctgcctggtccgaataaaatgctgccgaaagtgttctttagcaagaaatggatggcctattataacccgagcgaggatattcaaaagatctacaaaaatggcacctttaaaaagggcgacatgttcaatctgaacgattgccacaaactgatcgatttcttcaaagattcaatttcgcgttatccgaaatggtccaatgcctatgattttaactttagcgaaaccgaaaaatacaaagacattgccggtttttatcgcgaagtggaagaacagggctataaagtgagctttgaaagcgcaagcaaaaaagaggttgataagctggttgaagagggcaaactgtatatgttccagatttacaacaaagattttagcgacaaaagccatggcaccccgaatctgcataccatgtactttaaactgctgttcgacgaaaataaccatggtcagattcgtctgagcggtggtgccgaactgtttatgcgtcgtgcaagtctgaaaaaagaagaactggttgttcatccggcaaatagcccgattgcaaacaaaaatccggacaatccgaaaaaaaccacgacactgagctatgatgtgtataaagacaaacgttttagcgaggatcagtatctgctgcatatcccgattgccatcaataaatgcccgaaaaacatctttaagatcaacaccgaagttcgcgtgctgctgaaacatgatgataatccgtatgtgattggcattgatcgtggtgaacgtaacctgctgtatattgttgttgttgatggtaaaggcaacatcgtggaacagtatagtctgaacgaaattatcaacaactttaacggcatccgcatcaaaaccgactatcatagcctgctggacaagaaagaaaaagaacgttttgaagcacgtcagaactggaccagtattgaaaacatcaaagaactgaaagccggttatattagccaggtggttcataaaatctgtgagctggtagaaaaatacgatgcagttattgcactggaagatctgaatagcggtttcaaaaatagccgtgtgaaagtcgaaaaacaggtgtatcagaaattcgagaaaatgctgatcgacaaactgaactacatggtcgacaaaaaaagcaatccgtgtgcaaccggtggtgcactgaaaggttatcagattaccaacaaatttgaaagctttaaaagcatgagcacccagaacggctttatcttctatattccggcatggctgaccagcaaaattgatccgagcaccggttttgtgaacctgctgaaaacaaaatatacctccattgccgacagcaagaagtttattagcagctttgatcgcattatgtatgttccggaagaggacctgtttgaattcgcactggattacaaaaatttcagccgtaccgatgccgactacatcaaaaaatggaaactgtacagctatggtaaccgcattcgcatttttcgcaacccgaagaaaaacaatgtgttcgattgggaagaagtttgtctgaccagcgcatataaagaacttttcaacaaatacggcatcaactatcagcagggtgatattcgtgcactgctgtgtgaacagagcgataaagcgttttatagcagttttatggcactgatgagcctgatgctgcagatgcgtaatagcattaccggtcgcaccgatgtggattttctgattagtccggtgaaaaattccgatggcatcttttatgatagccgcaattacgaagcacaagaaaatgcaattctgccgaaaaacgcagatgcaaatggtgcatataacattgcacgtaaagttctgtgggcaattggccagtttaagaaagcagaagatgagaagctggacaaagtgaaaattgcgatcagcaataaagagtggctggaatacgcacagaccagcgttaaacatgcgccagcgcctgctcctgcacccgctccagctcctgccccagctccagcgcccgctcctgcgccagctcctgcacctgcgatggttagcaaaggtgaagaactgtttaccggcgttgtgccgattctggtggaactggatggtgatgtgaatggccataaatttagcgttagcggcgaaggcgaaggtgatgcgacctatggtaaactgaccctgaaatttatttgcaccaccggtaaactgccggttccgtggccgaccctggtgaccaccctgacctatggcgttcagtgctttagccgctatccggatcatatgaaacagcatgatttctttaaaagcgcgatgccggaaggctatgtgcaggaacgtaccatttttttcaaagatgatggcaactataaaacccgtgcggaagttaaatttgaaggcgataccctggtgaaccgcattgaactgaaaggtattgattttaaagaagatggcaacattctgggtcataaactggaatataattacaacagccataatgtgtatattatggccgataaacagaaaaatggcatcaaagtgaactttaaaatccgtcacaacattgaagatggtagcgtgcagctggcggatcattatcagcagaataccccgattggtgatggcccggtgctgctgccggataatcattatctgagcacccagagcgcgctgagcaaagatccgaatgaaaaacgtgatcatatggtgctgctggaatttgttaccgccgcgggcattaccctgggtatggatgaactgtataaa

SEQ ID NO: 408 - DNA, 4488 bp, synthetic construct
  misc_feature 1..4488: note = SYNTHETIC
  source 1..4488: mol_type = other DNA
atgagcaaactggaaaagttcaccaactgttatagcctgagcaaaaccctgcgttttaaagcaattccggttggtaaaacccaagagaacattgataataaacgcctgctggtcgaagatgaaaaacgcgctgaagattataaaggcgtgaaaaaactgctggatcgctattatctgagcttcattaacgatgtgctgcacagcattaaactgaagaacctgaacaactatatcagcctgtttcgtaaaaaaacccgcaccgaaaaagaaaacaaagagctggaaaacctggaaatcaatctgcgtaaagaaatcgccaaagcgtttaaaggtaacgagggttataaaagcctgttcaagaaagacatcatcgaaaccattctgccggaatttctggatgataaagatgaaattgccctggtgaatagctttaatggctttaccaccgcatttaccggcttttttgataatcgcgaaaacatgttcagcgaagaagcaaaaagcaccagcattgcatttcgctgcattaatgaaaatctgacccgctacattagcaacatggatatctttgaaaaagtggacgcgatcttcgataaacacgaagtgcaagagatcaaagagaaaatcctgaacagcgattatgacgtcgaagatttttttgaaggcgagttctttaacttcgttctgacccaagaaggtatcgacgtttataacgcaattattggtggttttgttaccgaaagcggtgagaaaatcaaaggcctgaatgaatatatcaacctgtataaccagaaaaccaaacagaaactgccgaaattcaaaccgctgtataaacaggttctgagcgatcgtgaaagcctgagcttttatggtgaaggttataccagtgatgaagaggttctggaagtttttcgtaacaccctgaataaaaacagcgagatctttagcagcatcaaaaagcttgagaaactgttcaaaaactttgatgagtatagcagcgcaggcatctttgttaaaaatggtccggcaattagcaccatcagcaaagatatttttggcgaatggaatgtgatccgcgataaatggaatgccgaatatgatgatatccacctgaaaaaaaaggccgtggtgaccgagaaatatgaagatgatcgtcgtaaaagcttcaagaaaattggtagctttagcctggaacagctgcaagaatatgcagatgcagatctgagcgttgtggaaaaactgaaagaaatcatcattcagaaggtggacgagatctataaagtttatggtagcagcgaaaaactgttcgatgcagattttgttctggaaaaaagcctgaaaaagaatgatgccgttgtggccattatgaaagatctgctggatagcgttaagagcttcgagaattacatcaaagccttttttggtgagggcaaagaaaccaatcgtgatgaaagtttctatggcgattttgtgctggcctatgatattctgctgaaagtggaccatatttatgatgccattcgcaattatgttacccagaaaccgtatagcaaagacaagttcaaactgtactttcagaacccgcagtttatgggtggttgggataaagataaagaaaccgattatcgtgccaccatcctgcgttatggtagtaaatactatctggccatcatggacaaaaaatacgcaaaatgcctgcagaaaatcgacaaagatgatgtgaatggcaactatgaaaaaatcaactacaaactgctgcctggtccgaataaaatgctgccgaaagtgttctttagcaagaaatggatggcctattataacccgagcgaggatattcaaaagatctacaaaaatggcacctttaaaaagggcgacatgttcaatctgaacgattgccacaaactgatcgatttcttcaaagattcaatttcgcgttatccgaaatggtccaatgcctatgattttaactttagcgaaaccgaaaaatacaaagacattgccggtttttatcgcgaagtggaagaacagggctataaagtgagctttgaaagcgcaagcaaaaaagaggttgataagctggttgaagagggcaaactgtatatgttccagatttacaacaaagattttagcgacaaaagccatggcaccccgaatctgcataccatgtactttaaactgctgttcgacgaaaataaccatggtcagattcgtctgagcggtggtgccgaactgtttatgcgtcgtgcaagtctgaaaaaagaagaactggttgttcatccggcaaatagcccgattgcaaacaaaaatccggacaatccgaaaaaaaccacgacactgagctatgatgtgtataaagacaaacgttttagcgaggatcagtatctgctgcatatcccgattgccatcaataaatgcccgaaaaacatctttaagatcaacaccgaagttcgcgtgctgctgaaacatgatgataatccgtatgtgattggcattgatcgtggtgaacgtaacctgctgtatattgttgttgttgatggtaaaggcaacatcgtggaacagtatagtctgaacgaaattatcaacaactttaacggcatccgcatcaaaaccgactatcatagcctgctggacaagaaagaaaaagaacgttttgaagcacgtcagaactggaccagtattgaaaacatcaaagaactgaaagccggttatattagccaggtggttcataaaatctgtgagctggtagaaaaatacgatgcagttattgcactggaagatctgaatagcggtttcaaaaatagccgtgtgaaagtcgaaaaacaggtgtatcagaaattcgagaaaatgctgatcgacaaactgaactacatggtcgacaaaaaaagcaatccgtgtgcaaccggtggtgcactgaaaggttatcagattaccaacaaatttgaaagctttaaaagcatgagcacccagaacggctttatcttctatattccggcatggctgaccagcaaaattgatccgagcaccggttttgtgaacctgctgaaaacaaaatatacctccattgccgacagcaagaagtttattagcagctttgatcgcattatgtatgttccggaagaggacctgtttgaattcgcactggattacaaaaatttcagccgtaccgatgccgactacatcaaaaaatggaaactgtacagctatggtaaccgcattcgcatttttcgcaacccgaagaaaaacaatgtgttcgattgggaagaagtttgtctgaccagcgcatataaagaacttttcaacaaatacggcatcaactatcagcagggtgatattcgtgcactgctgtgtgaacagagcgataaagcgttttatagcagttttatggcactgatgagcctgatgctgcagatgcgtaatagcattaccggtcgcaccgatgtggattttctgattagtccggtgaaaaattccgatggcatcttttatgatagccgcaattacgaagcacaagaaaatgcaattctgccgaaaaacgcagatgcaaatggtgcatataacattgcacgtaaagttctgtgggcaattggccagtttaagaaagcagaagatgagaagctggacaaagtgaaaattgcgatcagcaataaagagtggctggaatacgcacagaccagcgttaaacatgcgccagcgcctgctcctgcacccgctccagctcctgccccagctccagcgcccgctcctgcgccagctcctgcacctgctccagcgatggttagcaaaggtgaagaactgtttaccggcgttgtgccgattctggtggaactggatggtgatgtgaatggccataaatttagcgttagcggcgaaggcgaaggtgatgcgacctatggtaaactgaccctgaaatttatttgcaccaccggtaaactgccggttccgtggccgaccctggtgaccaccctgacctatggcgttcagtgctttagccgctatccggatcatatgaaacagcatgatttctttaaaagcgcgatgccggaaggctatgtgcaggaacgtaccatttttttcaaagatgatggcaactataaaacccgtgcggaagttaaatttgaaggcgataccctggtgaaccgcattgaactgaaaggtattgattttaaagaagatggcaacattctgggtcataaactggaatataattacaacagccataatgtgtatattatggccgataaacagaaaaatggcatcaaagtgaactttaaaatccgtcacaacattgaagatggtagcgtgcagctggcggatcattatcagcagaataccccgattggtgatggcccggtgctgctgccggataatcattatctgagcacccagagcgcgctgagcaaagatccgaatgaaaaacgtgatcatatggtgctgctggaatttgttaccgccgcgggcattaccctgggtatggatgaactgtataaa

SEQ ID NO: 409 - DNA, 4392 bp, synthetic construct
  misc_feature 1..4392: note = SYNTHETIC
  source 1..4392: mol_type = other DNA
atgagcaaactggaaaagttcaccaactgttatagcctgagcaaaaccctgcgttttaaagcaattccggttggtaaaacccaagagaacattgataataaacgcctgctggtcgaagatgaaaaacgcgctgaagattataaaggcgtgaaaaaactgctggatcgctattatctgagcttcattaacgatgtgctgcacagcattaaactgaagaacctgaacaactatatcagcctgtttcgtaaaaaaacccgcaccgaaaaagaaaacaaagagctggaaaacctggaaatcaatctgcgtaaagaaatcgccaaagcgtttaaaggtaacgagggttataaaagcctgttcaagaaagacatcatcgaaaccattctgccggaatttctggatgataaagatgaaattgccctggtgaatagctttaatggctttaccaccgcatttaccggcttttttgataatcgcgaaaacatgttcagcgaagaagcaaaaagcaccagcattgcatttcgctgcattaatgaaaatctgacccgctacattagcaacatggatatctttgaaaaagtggacgcgatcttcgataaacacgaagtgcaagagatcaaagagaaaatcctgaacagcgattatgacgtcgaagatttttttgaaggcgagttctttaacttcgttctgacccaagaaggtatcgacgtttataacgcaattattggtggttttgttaccgaaagcggtgagaaaatcaaaggcctgaatgaatatatcaacctgtataaccagaaaaccaaacagaaactgccgaaattcaaaccgctgtataaacaggttctgagcgatcgtgaaagcctgagcttttatggtgaaggttataccagtgatgaagaggttctggaagtttttcgtaacaccctgaataaaaacagcgagatctttagcagcatcaaaaagcttgagaaactgttcaaaaactttgatgagtatagcagcgcaggcatctttgttaaaaatggtccggcaattagcaccatcagcaaagatatttttggcgaatggaatgtgatccgcgataaatggaatgccgaatatgatgatatccacctgaaaaaaaaggccgtggtgaccgagaaatatgaagatgatcgtcgtaaaagcttcaagaaaattggtagctttagcctggaacagctgcaagaatatgcagatgcagatctgagcgttgtggaaaaactgaaagaaatcatcattcagaaggtggacgagatctataaagtttatggtagcagcgaaaaactgttcgatgcagattttgttctggaaaaaagcctgaaaaagaatgatgccgttgtggccattatgaaagatctgctggatagcgttaagagcttcgagaattacatcaaagccttttttggtgagggcaaagaaaccaatcgtgatgaaagtttctatggcgattttgtgctggcctatgatattctgctgaaagtggaccatatttatgatgccattcgcaattatgttacccagaaaccgtatagcaaagacaagttcaaactgtactttcagaacccgcagtttatgggtggttgggataaagataaagaaaccgattatcgtgccaccatcctgcgttatggtagtaaatactatctggccatcatggacaaaaaatacgcaaaatgcctgcagaaaatcgacaaagatgatgtgaatggcaactatgaaaaaatcaactacaaactgctgcctggtccgaataaaatgctgccgaaagtgttctttagcaagaaatggatggcctattataacccgagcgaggatattcaaaagatctacaaaaatggcacctttaaaaagggcgacatgttcaatctgaacgattgccacaaactgatcgatttcttcaaagattcaatttcgcgttatccgaaatggtccaatgcctatgattttaactttagcgaaaccgaaaaatacaaagacattgccggtttttatcgcgaagtggaagaacagggctataaagtgagctttgaaagcgcaagcaaaaaagaggttgataagctggttgaagagggcaaactgtatatgttccagatttacaacaaagattttagcgacaaaagccatggcaccccgaatctgcataccatgtactttaaactgctgttcgacgaaaataaccatggtcagattcgtctgagcggtggtgccgaactgtttatgcgtcgtgcaagtctgaaaaaagaagaactggttgttcatccggcaaatagcccgattgcaaacaaaaatccggacaatccgaaaaaaaccacgacactgagctatgatgtgtataaagacaaacgttttagcgaggatcagtatctgctgcatatcccgattgccatcaataaatgcccgaaaaacatctttaagatcaacaccgaagttcgcgtgctgctgaaacatgatgataatccgtatgtgattggcattgatcgtggtgaacgtaacctgctgtatattgttgttgttgatggtaaaggcaacatcgtggaacagtatagtctgaacgaaattatcaacaactttaacggcatccgcatcaaaaccgactatcatagcctgctggacaagaaagaaaaagaacgttttgaagcacgtcagaactggaccagtattgaaaacatcaaagaactgaaagccggttatattagccaggtggttcataaaatctgtgagctggtagaaaaatacgatgcagttattgcactggaagatctgaatagcggtttcaaaaatagccgtgtgaaagtcgaaaaacaggtgtatcagaaattcgagaaaatgctgatcgacaaactgaactacatggtcgacaaaaaaagcaatccgtgtgcaaccggtggtgcactgaaaggttatcagattaccaacaaatttgaaagctttaaaagcatgagcacccagaacggctttatcttctatattccggcatggctgaccagcaaaattgatccgagcaccggttttgtgaacctgctgaaaacaaaatatacctccattgccgacagcaagaagtttattagcagctttgatcgcattatgtatgttccggaagaggacctgtttgaattcgcactggattacaaaaatttcagccgtaccgatgccgactacatcaaaaaatggaaactgtacagctatggtaaccgcattcgcatttttcgcaacccgaagaaaaacaatgtgttcgattgggaagaagtttgtctgaccagcgcatataaagaacttttcaacaaatacggcatcaactatcagcagggtgatattcgtgcactgctgtgtgaacagagcgataaagcgttttatagcagttttatggcactgatgagcctgatgctgcagatgcgtaatagcattaccggtcgcaccgatgtggattttctgattagtccggtgaaaaattccgatggcatcttttatgatagccgcaattacgaagcacaagaaaatgcaattctgccgaaaaacgcagatgcaaatggtgcatataacattgcacgtaaagttctgtgggcaattggccagtttaagaaagcagaagatgagaagctggacaaagtgaaaattgcgatcagcaataaagagtggctggaatacgcacagaccagcgttaaacatatggtgagcaaaggtgaagaggataatatggccatcatcaaagaattcatgcgcttcaaagttcatatggaaggtagcgttaatggccacgaatttgaaattgaaggtgaaggcgaaggtcgtccgtatgaaggcacccagaccgcaaaactgaaagttaccaaaggtggtccgctgccgtttgcatgggatattctgagtccgcagtttatgtatggtagcaaagcctatgttaaacatccggcagatatcccggattatctgaaactgagctttccggaaggttttaaatgggaacgtgtgatgaattttgaagatggtggtgttgttaccgttacacaggatagcagcctgcaggatggtgaatttatctataaagttaaactgcgtggcacgaattttccgagtgatggtccggttatgcagaaaaaaaccatgggttgggaagcaagcagcgaacgtatgtatccggaagatggcgcactgaaaggtgaaattaaacagcgtctgaagctgaaagatggcggtcattatgatgcagaagttaaaaccacctacaaagccaaaaaaccggttcagctgcctggtgcatataacgttaacattaaactggatatcaccagccacaacgaggattataccattgttgaacagtatgaacgtgcagaaggtcgccatagtaccggtggtatggatgaactgtataaa

SEQ ID NO: 410 - DNA, 4428 bp, synthetic construct
  misc_feature 1..4428: note = SYNTHETIC
  source 1..4428: mol_type = other DNA
atgagcaaactggaaaagttcaccaactgttatagcctgagcaaaaccctgcgttttaaagcaattccggttggtaaaacccaagagaacattgataataaacgcctgctggtcgaagatgaaaaacgcgctgaagattataaaggcgtgaaaaaactgctggatcgctattatctgagcttcattaacgatgtgctgcacagcattaaactgaagaacctgaacaactatatcagcctgtttcgtaaaaaaacccgcaccgaaaaagaaaacaaagagctggaaaacctggaaatcaatctgcgtaaagaaatcgccaaagcgtttaaaggtaacgagggttataaaagcctgttcaagaaagacatcatcgaaaccattctgccggaatttctggatgataaagatgaaattgccctggtgaatagctttaatggctttaccaccgcatttaccggcttttttgataatcgcgaaaacatgttcagcgaagaagcaaaaagcaccagcattgcatttcgctgcattaatgaaaatctgacccgctacattagcaacatggatatctttgaaaaagtggacgcgatcttcgataaacacgaagtgcaagagatcaaagagaaaatcctgaacagcgattatgacgtcgaagatttttttgaaggcgagttctttaacttcgttctgacccaagaaggtatcgacgtttataacgcaattattggtggttttgttaccgaaagcggtgagaaaatcaaaggcctgaatgaatatatcaacctgtataaccagaaaaccaaacagaaactgccgaaattcaaaccgctgtataaacaggttctgagcgatcgtgaaagcctgagcttttatggtgaaggttataccagtgatgaagaggttctggaagtttttcgtaacaccctgaataaaaacagcgagatctttagcagcatcaaaaagcttgagaaactgttcaaaaactttgatgagtatagcagcgcaggcatctttgttaaaaatggtccggcaattagcaccatcagcaaagatatttttggcgaatggaatgtgatccgcgataaatggaatgccgaatatgatgatatccacctgaaaaaaaaggccgtggtgaccgagaaatatgaagatgatcgtcgtaaaagcttcaagaaaattggtagctttagcctggaacagctgcaagaatatgcagatgcagatctgagcgttgtggaaaaactgaaagaaatcatcattcagaaggtggacgagatctataaagtttatggtagcagcgaaaaactgttcgatgcagattttgttctggaaaaaagcctgaaaaagaatgatgccgttgtggccattatgaaagatctgctggatagcgttaagagcttcgagaattacatcaaagccttttttggtgagggcaaagaaaccaatcgtgatgaaagtttctatggcgattttgtgctggcctatgatattctgctgaaagtggaccatatttatgatgccattcgcaattatgttacccagaaaccgtatagcaaagacaagttcaaactgtactttcagaacccgcagtttatgggtggttgggataaagataaagaaaccgattatcgtgccaccatcctgcgttatggtagtaaatactatctggccatcatggacaaaaaatacgcaaaatgcctgcagaaaatcgacaaagatgatgtgaatggcaactatgaaaaaatcaactacaaactgctgcctggtccgaataaaatgctgccgaaagtgttctttagcaagaaatggatggcctattataacccgagcgaggatattcaaaagatctacaaaaatggcacctttaaaaagggcgacatgttcaatctgaacgattgccacaaactgatcgatttcttcaaagattcaatttcgcgttatccgaaatggtccaatgcctatgattttaactttagcgaaaccgaaaaatacaaagacattgccggtttttatcgcgaagtggaagaacagggctataaagtgagctttgaaagcgcaagcaaaaaagaggttgataagctggttgaagagggcaaactgtatatgttccagatttacaacaaagattttagcgacaaaagccatggcaccccgaatctgcataccatgtactttaaactgctgttcgacgaaaataaccatggtcagattcgtctgagcggtggtgccgaactgtttatgcgtcgtgcaagtctgaaaaaagaagaactggttgttcatccggcaaatagcccgattgcaaacaaaaatccggacaatccgaaaaaaaccacgacactgagctatgatgtgtataaagacaaacgttttagcgaggatcagtatctgctgcatatcccgattgccatcaataaatgcccgaaaaacatctttaagatcaacaccgaagttcgcgtgctgctgaaacatgatgataatccgtatgtgattggcattgatcgtggtgaacgtaacctgctgtatattgttgttgttgatggtaaaggcaacatcgtggaacagtatagtctgaacgaaattatcaacaactttaacggcatccgcatcaaaaccgactatcatagcctgctggacaagaaagaaaaagaacgttttgaagcacgtcagaactggaccagtattgaaaacatcaaagaactgaaagccggttatattagccaggtggttcataaaatctgtgagctggtagaaaaatacgatgcagttattgcactggaagatctgaatagcggtttcaaaaatagccgtgtgaaagtcgaaaaacaggtgtatcagaaattcgagaaaatgctgatcgacaaactgaactacatggtcgacaaaaaaagcaatccgtgtgcaaccggtggtgcactgaaaggttatcagattaccaacaaatttgaaagctttaaaagcatgagcacccagaacggctttatcttctatattccggcatggctgaccagcaaaattgatccgagcaccggttttgtgaacctgctgaaaacaaaatatacctccattgccgacagcaagaagtttattagcagctttgatcgcattatgtatgttccggaagaggacctgtttgaattcgcactggattacaaaaatttcagccgtaccgatgccgactacatcaaaaaatggaaactgtacagctatggtaaccgcattcgcatttttcgcaacccgaagaaaaacaatgtgttcgattgggaagaagtttgtctgaccagcgcatataaagaacttttcaacaaatacggcatcaactatcagcagggtgatattcgtgcactgctgtgtgaacagagcgataaagcgttttatagcagttttatggcactgatgagcctgatgctgcagatgcgtaatagcattaccggtcgcaccgatgtggattttctgattagtccggtgaaaaattccgatggcatcttttatgatagccgcaattacgaagcacaagaaaatgcaattctgccgaaaaacgcagatgcaaatggtgcatataacattgcacgtaaagttctgtgggcaattggccagtttaagaaagcagaagatgagaagctggacaaagtgaaaattgcgatcagcaataaagagtggctggaatacgcacagaccagcgttaaacatggtagcgcaggtagtgcagcaggtagcggtgaatttatggtgagcaaaggtgaagaggataatatggccatcatcaaagaattcatgcgcttcaaagttcatatggaaggtagcgttaatggccacgaatttgaaattgaaggtgaaggcgaaggtcgtccgtatgaaggcacccagaccgcaaaactgaaagttaccaaaggtggtccgctgccgtttgcatgggatattctgagtccgcagtttatgtatggtagcaaagcctatgttaaacatccggcagatatcccggattatctgaaactgagctttccggaaggttttaaatgggaacgtgtgatgaattttgaagatggtggtgttgttaccgttacacaggatagcagcctgcaggatggtgaatttatctataaagttaaactgcgtggcacgaattttccgagtgatggtccggttatgcagaaaaaaaccatgggttgggaagcaagcagcgaacgtatgtatccggaagatggcgcactgaaaggtgaaattaaacagcgtctgaagctgaaagatggcggtcattatgatgcagaagttaaaaccacctacaaagccaaaaaaccggttcagctgcctggtgcatataacgttaacattaaactggatatcaccagccacaacgaggattataccattgttgaacagtatgaacgtgcagaaggtcgccatagtaccggtggtatggatgaactgtataaa

SEQ ID NO: 411 - DNA, 4452 bp, synthetic construct
  misc_feature 1..4452: note = SYNTHETIC
  source 1..4452: mol_type = other DNA
atgagcaaactggaaaagttcaccaactgttatagcctgagcaaaaccctgcgttttaaagcaattccggttggtaaaacccaagagaacattgataataaacgcctgctggtcgaagatgaaaaacgcgctgaagattataaaggcgtgaaaaaactgctggatcgctattatctgagcttcattaacgatgtgctgcacagcattaaactgaagaacctgaacaactatatcagcctgtttcgtaaaaaaacccgcaccgaaaaagaaaacaaagagctggaaaacctggaaatcaatctgcgtaaagaaatcgccaaagcgtttaaaggtaacgagggttataaaagcctgttcaagaaagacatcatcgaaaccattctgccggaatttctggatgataaagatgaaattgccctggtgaatagctttaatggctttaccaccgcatttaccggcttttttgataatcgcgaaaacatgttcagcgaagaagcaaaaagcaccagcattgcatttcgctgcattaatgaaaatctgacccgctacattagcaacatggatatctttgaaaaagtggacgcgatcttcgataaacacgaagtgcaagagatcaaagagaaaatcctgaacagcgattatgacgtcgaagatttttttgaaggcgagttctttaacttcgttctgacccaagaaggtatcgacgtttataacgcaattattggtggttttgttaccgaaagcggtgagaaaatcaaaggcctgaatgaatatatcaacctgtataaccagaaaaccaaacagaaactgccgaaattcaaaccgctgtataaacaggttctgagcgatcgtgaaagcctgagcttttatggtgaaggttataccagtgatgaagaggttctggaagtttttcgtaacaccctgaataaaaacagcgagatctttagcagcatcaaaaagcttgagaaactgttcaaaaactttgatgagtatagcagcgcaggcatctttgttaaaaatggtccggcaattagcaccatcagcaaagatatttttggcgaatggaatgtgatccgcgataaatggaatgccgaatatgatgatatccacctgaaaaaaaaggccgtggtgaccgagaaatatgaagatgatcgtcgtaaaagcttcaagaaaattggtagctttagcctggaacagctgcaagaatatgcagatgcagatctgagcgttgtggaaaaactgaaagaaatcatcattcagaaggtggacgagatctataaagtttatggtagcagcgaaaaactgttcgatgcagattttgttctggaaaaaagcctgaaaaagaatgatgccgttgtggccattatgaaagatctgctggatagcgttaagagcttcgagaattacatcaaagccttttttggtgagggcaaagaaaccaatcgtgatgaaagtttctatggcgattttgtgctggcctatgatattctgctgaaagtggaccatatttatgatgccattcgcaattatgttacccagaaaccgtatagcaaagacaagttcaaactgtactttcagaacccgcagtttatgggtggttgggataaagataaagaaaccgattatcgtgccaccatcctgcgttatggtagtaaatactatctggccatcatggacaaaaaatacgcaaaatgcctgcagaaaatcgacaaagatgatgtgaatggcaactatgaaaaaatcaactacaaactgctgcctggtccgaataaaatgctgccgaaagtgttctttagcaagaaatggatggcctattataacccgagcgaggatattcaaaagatctacaaaaatggcacctttaaaaagggcgacatgttcaatctgaacgattgccacaaactgatcgatttcttcaaagattcaatttcgcgttatccgaaatggtccaatgcctatgattttaactttagcgaaaccgaaaaatacaaagacattgccggtttttatcgcgaagtggaagaacagggctataaagtgagctttgaaagcgcaagcaaaaaagaggttgataagctggttgaagagggcaaactgtatatgttccagatttacaacaaagattttagcgacaaaagccatggcaccccgaatctgcataccatgtactttaaactgctgttcgacgaaaataaccatggtcagattcgtctgagcggtggtgccgaactgtttatgcgtcgtgcaagtctgaaaaaagaagaactggttgttcatccggcaaatagcccgattgcaaacaaaaatccggacaatccgaaaaaaaccacgacactgagctatgatgtgtataaagacaaacgttttagcgaggatcagtatctgctgcatatcccgattgccatcaataaatgcccgaaaaacatctttaagatcaacaccgaagttcgcgtgctgctgaaacatgatgataatccgtatgtgattggcattgatcgtggtgaacgtaacctgctgtatattgttgttgttgatggtaaaggcaacatcgtggaacagtatagtctgaacgaaattatcaacaactttaacggcatccgcatcaaaaccgactatcatagcctgctggacaagaaagaaaaagaacgttttgaagcacgtcagaactggaccagtattgaaaacatcaaagaactgaaagccggttatattagccaggtggttcataaaatctgtgagctggtagaaaaatacgatgcagttattgcactggaagatctgaatagcggtttcaaaaatagccgtgtgaaagtcgaaaaacaggtgtatcagaaattcgagaaaatgctgatcgacaaactgaactacatggtcgacaaaaaaagcaatccgtgtgcaaccggtggtgcactgaaaggttatcagattaccaacaaatttgaaagctttaaaagcatgagcacccagaacggctttatcttctatattccggcatggctgaccagcaaaattgatccgagcaccggttttgtgaacctgctgaaaacaaaatatacctccattgccgacagcaagaagtttattagcagctttgatcgcattatgtatgttccggaagaggacctgtttgaattcgcactggattacaaaaatttcagccgtaccgatgccgactacatcaaaaaatggaaactgtacagctatggtaaccgcattcgcatttttcgcaacccgaagaaaaacaatgtgttcgattgggaagaagtttgtctgaccagcgcatataaagaacttttcaacaaatacggcatcaactatcagcagggtgatattcgtgcactgctgtgtgaacagagcgataaagcgttttatagcagttttatggcactgatgagcctgatgctgcagatgcgtaatagcattaccggtcgcaccgatgtggattttctgattagtccggtgaaaaattccgatggcatcttttatgatagccgcaattacgaagcacaagaaaatgcaattctgccgaaaaacgcagatgcaaatggtgcatataacattgcacgtaaagttctgtgggcaattggccagtttaagaaagcagaagatgagaagctggacaaagtgaaaattgcgatcagcaataaagagtggctggaatacgcacagaccagcgttaaacatggaggcggaggatcaggcggtggcggaagtggtggaggtgggtcgggaggtggtggtagcatggtgagcaaaggtgaagaggataatatggccatcatcaaagaattcatgcgcttcaaagttcatatggaaggtagcgttaatggccacgaatttgaaattgaaggtgaaggcgaaggtcgtccgtatgaaggcacccagaccgcaaaactgaaagttaccaaaggtggtccgctgccgtttgcatgggatattctgagtccgcagtttatgtatggtagcaaagcctatgttaaacatccggcagatatcccggattatctgaaactgagctttccggaaggttttaaatgggaacgtgtgatgaattttgaagatggtggtgttgttaccgttacacaggatagcagcctgcaggatggtgaatttatctataaagttaaactgcgtggcacgaattttccgagtgatggtccggttatgcagaaaaaaaccatgggttgggaagcaagcagcgaacgtatgtatccggaagatggcgcactgaaaggtgaaattaaacagcgtctgaagctgaaagatggcggtcattatgatgcagaagttaaaaccacctacaaagccaaaaaaccggttcagctgcctggtgcatataacgttaacattaaactggatatcaccagccacaacgaggattataccattgttgaacagtatgaacgtgcagaaggtcgccatagtaccggtggtatggatgaactgtataaa

SEQ ID NO: 412 - DNA, 4437 bp, synthetic construct
  misc_feature 1..4437: note = SYNTHETIC
  source 1..4437: mol_type = other DNA
atgagcaaactggaaaagttcaccaactgttatagcctgagcaaaaccctgcgttttaaagcaattccggttggtaaaacccaagagaacattgataataaacgcctgctggtcgaagatgaaaaacgcgctgaagattataaaggcgtgaaaaaactgctggatcgctattatctgagcttcattaacgatgtgctgcacagcattaaactgaagaacctgaacaactatatcagcctgtttcgtaaaaaaacccgcaccgaaaaagaaaacaaagagctggaaaacctggaaatcaatctgcgtaaagaaatcgccaaagcgtttaaaggtaacgagggttataaaagcctgttcaagaaagacatcatcgaaaccattctgccggaatttctggatgataaagatgaaattgccctggtgaatagctttaatggctttaccaccgcatttaccggcttttttgataatcgcgaaaacatgttcagcgaagaagcaaaaagcaccagcattgcatttcgctgcattaatgaaaatctgacccgctacattagcaacatggatatctttgaaaaagtggacgcgatcttcgataaacacgaagtgcaagagatcaaagagaaaatcctgaacagcgattatgacgtcgaagatttttttgaaggcgagttctttaacttcgttctgacccaagaaggtatcgacgtttataacgcaattattggtggttttgttaccgaaagcggtgagaaaatcaaaggcctgaatgaatatatcaacctgtataaccagaaaaccaaacagaaactgccgaaattcaaaccgctgtataaacaggttctgagcgatcgtgaaagcctgagcttttatggtgaaggttataccagtgatgaagaggttctggaagtttttcgtaacaccctgaataaaaacagcgagatctttagcagcatcaaaaagcttgagaaactgttcaaaaactttgatgagtatagcagcgcaggcatctttgttaaaaatggtccggcaattagcaccatcagcaaagatatttttggcgaatggaatgtgatccgcgataaatggaatgccgaatatgatgatatccacctgaaaaaaaaggccgtggtgaccgagaaatatgaagatgatcgtcgtaaaagcttcaagaaaattggtagctttagcctggaacagctgcaagaatatgcagatgcagatctgagcgttgtggaaaaactgaaagaaatcatcattcagaaggtggacgagatctataaagtttatggtagcagcgaaaaactgttcgatgcagattttgttctggaaaaaagcctgaaaaagaatgatgccgttgtggccattatgaaagatctgctggatagcgttaagagcttcgagaattacatcaaagccttttttggtgagggcaaagaaaccaatcgtgatgaaagtttctatggcgattttgtgctggcctatgatattctgctgaaagtggaccatatttatgatgccattcgcaattatgttacccagaaaccgtatagcaaagacaagttcaaactgtactttcagaacccgcagtttatgggtggttgggataaagataaagaaaccgattatcgtgccaccatcctgcgttatggtagtaaatactatctggccatcatggacaaaaaatacgcaaaatgcctgcagaaaatcgacaaagatgatgtgaatggcaactatgaaaaaatcaactacaaactgctgcctggtccgaataaaatgctgccgaaagtgttctttagcaagaaatggatggcctattataacccgagcgaggatattcaaaagatctacaaaaatggcacctttaaaaagggcgacatgttcaatctgaacgattgccacaaactgatcgatttcttcaaagattcaatttcgcgttatccgaaatggtccaatgcctatgattttaactttagcgaaaccgaaaaatacaaagacattgccggtttttatcgcgaagtggaagaacagggctataaagtgagctttgaaagcgcaagcaaaaaagaggttgataagctggttgaagagggcaaactgtatatgttccagatttacaacaaagattttagcgacaaaagccatggcaccccgaatctgcataccatgtactttaaactgctgttcgacgaaaataaccatggtcagattcgtctgagcggtggtgccgaactgtttatgcgtcgtgcaagtctgaaaaaagaagaactggttgttcatccggcaaatagcccgattgcaaacaaaaatccggacaatccgaaaaaaaccacgacactgagctatgatgtgtataaagacaaacgttttagcgaggatcagtatctgctgcatatcccgattgccatcaataaatgcccgaaaaacatctttaagatcaacaccgaagttcgcgtgctgctgaaacatgatgataatccgtatgtgattggcattgatcgtggtgaacgtaacctgctgtatattgttgttgttgatggtaaaggcaacatcgtggaacagtatagtctgaacgaaattatcaacaactttaacggcatccgcatcaaaaccgactatcatagcctgctggacaagaaagaaaaagaacgttttgaagcacgtcagaactggaccagtattgaaaacatcaaagaactgaaagccggttatattagccaggtggttcataaaatctgtgagctggtagaaaaatacgatgcagttattgcactggaagatctgaatagcggtttcaaaaatagccgtgtgaaagtcgaaaaacaggtgtatcagaaattcgagaaaatgctgatcgacaaactgaactacatggtcgacaaaaaaagcaatccgtgtgcaaccggtggtgcactgaaaggttatcagattaccaacaaatttgaaagctttaaaagcatgagcacccagaacggctttatcttctatattccggcatggctgaccagcaaaattgatccgagcaccggttttgtgaacctgctgaaaacaaaatatacctccattgccgacagcaagaagtttattagcagctttgatcgcattatgtatgttccggaagaggacctgtttgaattcgcactggattacaaaaatttcagccgtaccgatgccgactacatcaaaaaatggaaactgtacagctatggtaaccgcattcgcatttttcgcaacccgaagaaaaacaatgtgttcgattgggaagaagtttgtctgaccagcgcatataaagaacttttcaacaaatacggcatcaactatcagcagggtgatattcgtgcactgctgtgtgaacagagcgataaagcgttttatagcagttttatggcactgatgagcctgatgctgcagatgcgtaatagcattaccggtcgcaccgatgtggattttctgattagtccggtgaaaaattccgatggcatcttttatgatagccgcaattacgaagcacaagaaaatgcaattctgccgaaaaacgcagatgcaaatggtgcatataacattgcacgtaaagttctgtgggcaattggccagtttaagaaagcagaagatgagaagctggacaaagtgaaaattgcgatcagcaataaagagtggctggaatacgcacagaccagcgttaaacatggaggcggagggtcggaagcggcagcaaaaggaggcggaggaagtatggtgagcaaaggtgaagaggataatatggccatcatcaaagaattcatgcgcttcaaagttcatatggaaggtagcgttaatggccacgaatttgaaattgaaggtgaaggcgaaggtcgtccgtatgaaggcacccagaccgcaaaactgaaagttaccaaaggtggtccgctgccgtttgcatgggatattctgagtccgcagtttatgtatggtagcaaagcctatgttaaacatccggcagatatcccggattatctgaaactgagctttccggaaggttttaaatgggaacgtgtgatgaattttgaagatggtggtgttgttaccgttacacaggatagcagcctgcaggatggtgaatttatctataaagttaaactgcgtggcacgaattttccgagtgatggtccggttatgcagaaaaaaaccatgggttgggaagcaagcagcgaacgtatgtatccggaagatggcgcactgaaaggtgaaattaaacagcgtctgaagctgaaagatggcggtcattatgatgcagaagttaaaaccacctacaaagccaaaaaaccggttcagctgcctggtgcatataacgttaacattaaactggatatcaccagccacaacgaggattataccattgttgaacagtatgaacgtgcagaaggtcgccatagtaccggtggtatggatgaactgtataaa

SEQ ID NO: 413 - DNA, 4458 bp, synthetic construct
  misc_feature 1..4458: note = SYNTHETIC
  source 1..4458: mol_type = other DNA
atgagcaaactggaaaagttcaccaactgttatagcctgagcaaaaccctgcgttttaaagcaattccggttggtaaaacccaagagaacattgataataaacgcctgctggtcgaagatgaaaaacgcgctgaagattataaaggcgtgaaaaaactgctggatcgctattatctgagcttcattaacgatgtgctgcacagcattaaactgaagaacctgaacaactatatcagcctgtttcgtaaaaaaacccgcaccgaaaaagaaaacaaagagctggaaaacctggaaatcaatctgcgtaaagaaatcgccaaagcgtttaaaggtaacgagggttataaaagcctgttcaagaaagacatcatcgaaaccattctgccggaatttctggatgataaagatgaaattgccctggtgaatagctttaatggctttaccaccgcatttaccggcttttttgataatcgcgaaaacatgttcagcgaagaagcaaaaagcaccagcattgcatttcgctgcattaatgaaaatctgacccgctacattagcaacatggatatctttgaaaaagtggacgcgatcttcgataaacacgaagtgcaagagatcaaagagaaaatcctgaacagcgattatgacgtcgaagatttttttgaaggcgagttctttaacttcgttctgacccaagaaggtatcgacgtttataacgcaattattggtggttttgttaccgaaagcggtgagaaaatcaaaggcctgaatgaatatatcaacctgtataaccagaaaaccaaacagaaactgccgaaattcaaaccgctgtataaacaggttctgagcgatcgtgaaagcctgagcttttatggtgaaggttataccagtgatgaagaggttctggaagtttttcgtaacaccctgaataaaaacagcgagatctttagcagcatcaaaaagcttgagaaactgttcaaaaactttgatgagtatagcagcgcaggcatctttgttaaaaatggtccggcaattagcaccatcagcaaagatatttttggcgaatggaatgtgatccgcgataaatggaatgccgaatatgatgatatccacctgaaaaaaaaggccgtggtgaccgagaaatatgaagatgatcgtcgtaaaagcttcaagaaaattggtagctttagcctggaacagctgcaagaatatgcagatgcagatctgagcgttgtggaaaaactgaaagaaatcatcattcagaaggtggacgagatctataaagtttatggtagcagcgaaaaactgttcgatgcagattttgttctggaaaaaagcctgaaaaagaatgatgccgttgtggccattatgaaagatctgctggatagcgttaagagcttcgagaattacatcaaagccttttttggtgagggcaaagaaaccaatcgtgatgaaagtttctatggcgattttgtgctggcctatgatattctgctgaaagtggaccatatttatgatgccattcgcaattatgttacccagaaaccgtatagcaaagacaagttcaaactgtactttcagaacccgcagtttatgggtggttgggataaagataaagaaaccgattatcgtgccaccatcctgcgttatggtagtaaatactatctggccatcatggacaaaaaatacgcaaaatgcctgcagaaaatcgacaaagatgatgtgaatggcaactatgaaaaaatcaactacaaactgctgcctggtccgaataaaatgctgccgaaagtgttctttagcaagaaatggatggcctattataacccgagcgaggatattcaaaagatctacaaaaatggcacctttaaaaagggcgacatgttcaatctgaacgattgccacaaactgatcgatttcttcaaagattcaatttcgcgttatccgaaatggtccaatgcctatgattttaactttagcgaaaccgaaaaatacaaagacattgccggtttttatcgcgaagtggaagaacagggctataaagtgagctttgaaagcgcaagcaaaaaagaggttgataagctggttgaagagggcaaactgtatatgttccagatttacaacaaagattttagcgacaaaagccatggcaccccgaatctgcataccatgtactttaaactgctgttcgacgaaaataaccatggtcagattcgtctgagcggtggtgccgaactgtttatgcgtcgtgcaagtctgaaaaaagaagaactggttgttcatccggcaaatagcccgattgcaaacaaaaatccggacaatccgaaaaaaaccacgacactgagctatgatgtgtataaagacaaacgttttagcgaggatcagtatctgctgcatatcccgattgccatcaataaatgcccgaaaaacatctttaagatcaacaccgaagttcgcgtgctgctgaaacatgatgataatccgtatgtgattggcattgatcgtggtgaacgtaacctgctgtatattgttgttgttgatggtaaaggcaacatcgtggaacagtatagtctgaacgaaattatcaacaactttaacggcatccgcatcaaaaccgactatcatagcctgctggacaagaaagaaaaagaacgttttgaagcacgtcagaactggaccagtattgaaaacatcaaagaactgaaagccggttatattagccaggtggttcataaaatctgtgagctggtagaaaaatacgatgcagttattgcactggaagatctgaatagcggtttcaaaaatagccgtgtgaaagtcgaaaaacaggtgtatcagaaattcgagaaaatgctgatcgacaaactgaactacatggtcgacaaaaaaagcaatccgtgtgcaaccggtggtgcactgaaaggttatcagattaccaacaaatttgaaagctttaaaagcatgagcacccagaacggctttatcttctatattccggcatggctgaccagcaaaattgatccgagcaccggttttgtgaacctgctgaaaacaaaatatacctccattgccgacagcaagaagtttattagcagctttgatcgcattatgtatgttccggaagaggacctgtttgaattcgcactggattacaaaaatttcagccgtaccgatgccgactacatcaaaaaatggaaactgtacagctatggtaaccgcattcgcatttttcgcaacccgaagaaaaacaatgtgttcgattgggaagaagtttgtctgaccagcgcatataaagaacttttcaacaaatacggcatcaactatcagcagggtgatattcgtgcactgctgtgtgaacagagcgataaagcgttttatagcagttttatggcactgatgagcctgatgctgcagatgcgtaatagcattaccggtcgcaccgatgtggattttctgattagtccggtgaaaaattccgatggcatcttttatgatagccgcaattacgaagcacaagaaaatgcaattctgccgaaaaacgcagatgcaaatggtgcatataacattgcacgtaaagttctgtgggcaattggccagtttaagaaagcagaagatgagaagctggacaaagtgaaaattgcgatcagcaataaagagtggctggaatacgcacagaccagcgttaaacatgctgaggccgcagcaaaagaggctgccgctaaggaggctgctgcaaaagaagcagcagcgaaagctatggtgagcaaaggtgaagaggataatatggccatcatcaaagaattcatgcgcttcaaagttcatatggaaggtagcgttaatggccacgaatttgaaattgaaggtgaaggcgaaggtcgtccgtatgaaggcacccagaccgcaaaactgaaagttaccaaaggtggtccgctgccgtttgcatgggatattctgagtccgcagtttatgtatggtagcaaagcctatgttaaacatccggcagatatcccggattatctgaaactgagctttccggaaggttttaaatgggaacgtgtgatgaattttgaagatggtggtgttgttaccgttacacaggatagcagcctgcaggatggtgaatttatctataaagttaaactgcgtggcacgaattttccgagtgatggtccggttatgcagaaaaaaaccatgggttgggaagcaagcagcgaacgtatgtatccggaagatggcgcactgaaaggtgaaattaaacagcgtctgaagctgaaagatggcggtcattatgatgcagaagttaaaaccacctacaaagccaaaaaaccggttcagctgcctggtgcatataacgttaacattaaactggatatcaccagccacaacgaggattataccattgttgaacagtatgaacgtgcagaaggtcgccatagtaccggtggtatggatgaactgtataaa

SEQ ID NO: 414 - DNA, 4530 bp, synthetic construct
  misc_feature 1..4530: note = SYNTHETIC
  source 1..4530: mol_type = other DNA
atgagcaaactggaaaagttcaccaactgttatagcctgagcaaaaccctgcgttttaaagcaattccggttggtaaaacccaagagaacattgataataaacgcctgctggtcgaagatgaaaaacgcgctgaagattataaaggcgtgaaaaaactgctggatcgctattatctgagcttcattaacgatgtgctgcacagcattaaactgaagaacctgaacaactatatcagcctgtttcgtaaaaaaacccgcaccgaaaaagaaaacaaagagctggaaaacctggaaatcaatctgcgtaaagaaatcgccaaagcgtttaaaggtaacgagggttataaaagcctgttcaagaaagacatcatcgaaaccattctgccggaatttctggatgataaagatgaaattgccctggtgaatagctttaatggctttaccaccgcatttaccggcttttttgataatcgcgaaaacatgttcagcgaagaagcaaaaagcaccagcattgcatttcgctgcattaatgaaaatctgacccgctacattagcaacatggatatctttgaaaaagtggacgcgatcttcgataaacacgaagtgcaagagatcaaagagaaaatcctgaacagcgattatgacgtcgaagatttttttgaaggcgagttctttaacttcgttctgacccaagaaggtatcgacgtttataacgcaattattggtggttttgttaccgaaagcggtgagaaaatcaaaggcctgaatgaatatatcaacctgtataaccagaaaaccaaacagaaactgccgaaattcaaaccgctgtataaacaggttctgagcgatcgtgaaagcctgagcttttatggtgaaggttataccagtgatgaagaggttctggaagtttttcgtaacaccctgaataaaaacagcgagatctttagcagcatcaaaaagcttgagaaactgttcaaaaactttgatgagtatagcagcgcaggcatctttgttaaaaatggtccggcaattagcaccatcagcaaagatatttttggcgaatggaatgtgatccgcgataaatggaatgccgaatatgatgatatccacctgaaaaaaaaggccgtggtgaccgagaaatatgaagatgatcgtcgtaaaagcttcaagaaaattggtagctttagcctggaacagctgcaagaatatgcagatgcagatctgagcgttgtggaaaaactgaaagaaatcatcattcagaaggtggacgagatctataaagtttatggtagcagcgaaaaactgttcgatgcagattttgttctggaaaaaagcctgaaaaagaatgatgccgttgtggccattatgaaagatctgctggatagcgttaagagcttcgagaattacatcaaagccttttttggtgagggcaaagaaaccaatcgtgatgaaagtttctatggcgattttgtgctggcctatgatattctgctgaaagtggaccatatttatgatgccattcgcaattatgttacccagaaaccgtatagcaaagacaagttcaaactgtactttcagaacccgcagtttatgggtggttgggataaagataaagaaaccgattatcgtgccaccatcctgcgttatggtagtaaatactatctggccatcatggacaaaaaatacgcaaaatgcctgcagaaaatcgacaaagatgatgtgaatggcaactatgaaaaaatcaactacaaactgctgcctggtccgaataaaatgctgccgaaagtgttctttagcaagaaatggatggcctattataacccgagcgaggatattcaaaagatctacaaaaatggcacctttaaaaagggcgacatgttcaatctgaacgattgccacaaactgatcgatttcttcaaagattcaatttcgcgttatccgaaatggtccaatgcctatgattttaactttagcgaaaccgaaaaatacaaagacattgccggtttttatcgcgaagtggaagaacagggctataaagtgagctttgaaagcgcaagcaaaaaagaggttgataagctggttgaagagggcaaactgtatatgttccagatttacaacaaagattttagcgacaaaagccatggcaccccgaatctgcataccatgtactttaaactgctgttcgacgaaaataaccatggtcagattcgtctgagcggtggtgccgaactgtttatgcgtcgtgcaagtctgaaaaaagaagaactggttgttcatccggcaaatagcccgattgcaaacaaaaatccggacaatccgaaaaaaaccacgacactgagctatgatgtgtataaagacaaacgttttagcgaggatcagtatctgctgcatatcccgattgccatcaataaatgcccgaaaaacatctttaagatcaacaccgaagttcgcgtgctgctgaaacatgatgataatccgtatgtgattggcattgatcgtggtgaacgtaacctgctgtatattgttgttgttgatggtaaaggcaacatcgtggaacagtatagtctgaacgaaattatcaacaactttaacggcatccgcatcaaaaccgactatcatagcctgctggacaagaaagaaaaagaacgttttgaagcacgtcagaactggaccagtattgaaaacatcaaagaactgaaagccggttatattagccaggtggttcataaaatctgtgagctggtagaaaaatacgatgcagttattgcactggaagatctgaatagcggtttcaaaaatagccgtgtgaaagtcgaaaaacaggtgtatcagaaattcgagaaaatgctgatcgacaaactgaactacatggtcgacaaaaaaagcaatccgtgtgcaaccggtggtgcactgaaaggttatcagattaccaacaaatttgaaagctttaaaagcatgagcacccagaacggctttatcttctatattccggcatggctgaccagcaaaattgatccgagcaccggttttgtgaacctgctgaaaacaaaatatacctccattgccgacagcaagaagtttattagcagctttgatcgcattatgtatgttccggaagaggacctgtttgaattcgcactggattacaaaaatttcagccgtaccgatgccgactacatcaaaaaatggaaactgtacagctatggtaaccgcattcgcatttttcgcaacccgaagaaaaacaatgtgttcgattgggaagaagtttgtctgaccagcgcatataaagaacttttcaacaaatacggcatcaactatcagcagggtgatattcgtgcactgctgtgtgaacagagcgataaagcgttttatagcagttttatggcactgatgagcctgatgctgcagatgcgtaatagcattaccggtcgcaccgatgtggattttctgattagtccggtgaaaaattccgatggcatcttttatgatagccgcaattacgaagcacaagaaaatgcaattctgccgaaaaacgcagatgcaaatggtgcatataacattgcacgtaaagttctgtgggcaattggccagtttaagaaagcagaagatgagaagctggacaaagtgaaaattgcgatcagcaataaagagtggctggaatacgcacagaccagcgttaaacatgccgaagcagcagccaaagaagctgccgcaaaggaggcggcagctaaagaagcggccgctaaggcattggaagcggaggcggctgccaaggaggctgcggcgaaagaagctgcggccaaagaagcggctgcaaaagcgatggtgagcaaaggtgaagaggataatatggccatcatcaaagaattcatgcgcttcaaagttcatatggaaggtagcgttaatggccacgaatttgaaattgaaggtgaaggcgaaggtcgtccgtatgaaggcacccagaccgcaaaactgaaagttaccaaaggtggtccgctgccgtttgcatgggatattctgagtccgcagtttatgtatggtagcaaagcctatgttaaacatccggcagatatcccggattatctgaaactgagctttccggaaggttttaaatgggaacgtgtgatgaattttgaagatggtggtgttgttaccgttacacaggatagcagcctgcaggatggtgaatttatctataaagttaaactgcgtggcacgaattttccgagtgatggtccggttatgcagaaaaaaaccatgggttgggaagcaagcagcgaacgtatgtatccggaagatggcgcactgaaaggtgaaattaaacagcgtctgaagctgaaagatggcggtcattatgatgcagaagttaaaaccacctacaaagccaaaaaaccggttcagctgcctggtgcatataacgttaacattaaactggatatcaccagccacaacgaggattataccattgttgaacagtatgaacgtgcagaaggtcgccatagtaccggtggtatggatgaactgtataaa

SEQ ID NO: 415 - DNA, 4542 bp, synthetic construct
  misc_feature 1..4542: note = SYNTHETIC
  source 1..4542: mol_type = other DNA
atgagcaaactggaaaagttcaccaactgttatagcctgagcaaaaccctgcgttttaaagcaattccggttggtaaaacccaagagaacattgataataaacgcctgctggtcgaagatgaaaaacgcgctgaagattataaaggcgtgaaaaaactgctggatcgctattatctgagcttcattaacgatgtgctgcacagcattaaactgaagaacctgaacaactatatcagcctgtttcgtaaaaaaacccgcaccgaaaaagaaaacaaagagctggaaaacctggaaatcaatctgcgtaaagaaatcgccaaagcgtttaaaggtaacgagggttataaaagcctgttcaagaaagacatcatcgaaaccattctgccggaatttctggatgataaagatgaaattgccctggtgaatagctttaatggctttaccaccgcatttaccggcttttttgataatcgcgaaaacatgttcagcgaagaagcaaaaagcaccagcattgcatttcgctgcattaatgaaaatctgacccgctacattagcaacatggatatctttgaaaaagtggacgcgatcttcgataaacacgaagtgcaagagatcaaagagaaaatcctgaacagcgattatgacgtcgaagatttttttgaaggcgagttctttaacttcgttctgacccaagaaggtatcgacgtttataacgcaattattggtggttttgttaccgaaagcggtgagaaaatcaaaggcctgaatgaatatatcaacctgtataaccagaaaaccaaacagaaactgccgaaattcaaaccgctgtataaacaggttctgagcgatcgtgaaagcctgagcttttatggtgaaggttataccagtgatgaagaggttctggaagtttttcgtaacaccctgaataaaaacagcgagatctttagcagcatcaaaaagcttgagaaactgttcaaaaactttgatgagtatagcagcgcaggcatctttgttaaaaatggtccggcaattagcaccatcagcaaagatatttttggcgaatggaatgtgatccgcgataaatggaatgccgaatatgatgatatccacctgaaaaaaaaggccgtggtgaccgagaaatatgaagatgatcgtcgtaaaagcttcaagaaaattggtagctttagcctggaacagctgcaagaatatgcagatgcagatctgagcgttgtggaaaaactgaaagaaatcatcattcagaaggtggacgagatctataaagtttatggtagcagcgaaaaactgttcgatgcagattttgttctggaaaaaagcctgaaaaagaatgatgccgttgtggccattatgaaagatctgctggatagcgttaagagcttcgagaattacatcaaagccttttttggtgagggcaaagaaaccaatcgtgatgaaagtttctatggcgattttgtgctggcctatgatattctgctgaaagtggaccatatttatgatgccattcgcaattatgttacccagaaaccgtatagcaaagacaagttcaaactgtactttcagaacccgcagtttatgggtggttgggataaagataaagaaaccgattatcgtgccaccatcctgcgttatggtagtaaatactatctggccatcatggacaaaaaatacgcaaaatgcctgcagaaaatcgacaaagatgatgtgaatggcaactatgaaaaaatcaactacaaactgctgcctggtccgaataaaatgctgccgaaagtgttctttagcaagaaatggatggcctattataacccgagcgaggatattcaaaagatctacaaaaatggcacctttaaaaagggcgacatgttcaatctgaacgattgccacaaactgatcgatttcttcaaagattcaatttcgcgttatccgaaatggtccaatgcctatgattttaactttagcgaaaccgaaaaatacaaagacattgccggtttttatcgcgaagtggaagaacagggctataaagtgagctttgaaagcgcaagcaaaaaagaggttgataagctggttgaagagggcaaactgtatatgttccagatttacaacaaagattttagcgacaaaagccatggcaccccgaatctgcataccatgtactttaaactgctgttcgacgaaaataaccatggtcagattcgtctgagcggtggtgccgaactgtttatgcgtcgtgcaagtctgaaaaaagaagaactggttgttcatccggcaaatagcccgattgcaaacaaaaatccggacaatccgaaaaaaaccacgacactgagctatgatgtgtataaagacaaacgttttagcgaggatcagtatctgctgcatatcccgattgccatcaataaatgcccgaaaaacatctttaagatcaacaccgaagttcgcgtgctgctgaaacatgatgataatccgtatgtgattggcattgatcgtggtgaacgtaacctgctgtatattgttgttgttgatggtaaaggcaacatcgtggaacagtatagtctgaacgaaattatcaacaactttaacggcatccgcatcaaaaccgactatcatagcctgctggacaagaaagaaaaagaacgttttgaagcacgtcagaactggaccagtattgaaaacatcaaagaactgaaagccggttatattagccaggtggttcataaaatctgtgagctggtagaaaaatacgatgcagttattgcactggaagatctgaatagcggtttcaaaaatagccgtgtgaaagtcgaaaaacaggtgtatcagaaattcgagaaaatgctgatcgacaaactgaactacatggtcgacaaaaaaagcaatccgtgtgcaaccggtggtgcactgaaaggttatcagattaccaacaaatttgaaagctttaaaagcatgagcacccagaacggctttatcttctatattccggcatggctgaccagcaaaattgatccgagcaccggttttgtgaacctgctgaaaacaaaatatacctccattgccgacagcaagaagtttattagcagctttgatcgcattatgtatgttccggaagaggacctgtttgaattcgcactggattacaaaaatttcagccgtaccgatgccgactacatcaaaaaatggaaactgtacagctatggtaaccgcattcgcatttttcgcaacccgaagaaaaacaatgtgttcgattgggaagaagtttgtctgaccagcgcatataaagaacttttcaacaaatacggcatcaactatcagcagggtgatattcgtgcactgctgtgtgaacagagcgataaagcgttttatagcagttttatggcactgatgagcctgatgctgcagatgcgtaatagcattaccggtcgcaccgatgtggattttctgattagtccggtgaaaaattccgatggcatcttttatgatagccgcaattacgaagcacaagaaaatgcaattctgccgaaaaacgcagatgcaaatggtgcatataacattgcacgtaaagttctgtgggcaattggccagtttaagaaagcagaagatgagaagctggacaaagtgaaaattgcgatcagcaataaagagtggctggaatacgcacagaccagcgttaaacatttagaggctgaggctgctgccaaggaggctgctgcgaaggaagctgcagctaaagaggcagcggccaaagcacttgaggccgaagccgccgcgaaagaagccgctgctaaggaggcagccgccaaagaagcggcagctaaagcattagaaatggtgagcaaaggtgaagaggataatatggccatcatcaaagaattcatgcgcttcaaagttcatatggaaggtagcgttaatggccacgaatttgaaattgaaggtgaaggcgaaggtcgtccgtatgaaggcacccagaccgcaaaactgaaagttaccaaaggtggtccgctgccgtttgcatgggatattctgagtccgcagtttatgtatggtagcaaagcctatgttaaacatccggcagatatcccggattatctgaaactgagctttccggaaggttttaaatgggaacgtgtgatgaattttgaagatggtggtgttgttaccgttacacaggatagcagcctgcaggatggtgaatttatctataaagttaaactgcgtggcacgaattttccgagtgatggtccggttatgcagaaaaaaaccatgggttgggaagcaagcagcgaacgtatgtatccggaagatggcgcactgaaaggtgaaattaaacagcgtctgaagctgaaagatggcggtcattatgatgcagaagttaaaaccacctacaaagccaaaaaaccggttcagctgcctggtgcatataacgttaacattaaactggatatcaccagccacaacgaggattataccattgttgaacagtatgaacgtgcagaaggtcgccatagtaccggtggtatggatgaactgtataaa

SEQ ID NO: 416 - DNA, 4401 bp, synthetic construct
  misc_feature 1..4401: note = SYNTHETIC
  source 1..4401: mol_type = other DNA
atgagcaaactggaaaagttcaccaactgttatagcctgagcaaaaccctgcgttttaaagcaattccggttggtaaaacccaagagaacattgataataaacgcctgctggtcgaagatgaaaaacgcgctgaagattataaaggcgtgaaaaaactgctggatcgctattatctgagcttcattaacgatgtgctgcacagcattaaactgaagaacctgaacaactatatcagcctgtttcgtaaaaaaacccgcaccgaaaaagaaaacaaagagctggaaaacctggaaatcaatctgcgtaaagaaatcgccaaagcgtttaaaggtaacgagggttataaaagcctgttcaagaaagacatcatcgaaaccattctgccggaatttctggatgataaagatgaaattgccctggtgaatagctttaatggctttaccaccgcatttaccggcttttttgataatcgcgaaaacatgttcagcgaagaagcaaaaagcaccagcattgcatttcgctgcattaatgaaaatctgacccgctacattagcaacatggatatctttgaaaaagtggacgcgatcttcgataaacacgaagtgcaagagatcaaagagaaaatcctgaacagcgattatgacgtcgaagatttttttgaaggcgagttctttaacttcgttctgacccaagaaggtatcgacgtttataacgcaattattggtggttttgttaccgaaagcggtgagaaaatcaaaggcctgaatgaatatatcaacctgtataaccagaaaaccaaacagaaactgccgaaattcaaaccgctgtataaacaggttctgagcgatcgtgaaagcctgagcttttatggtgaaggttataccagtgatgaagaggttctggaagtttttcgtaacaccctgaataaaaacagcgagatctttagcagcatcaaaaagcttgagaaactgttcaaaaactttgatgagtatagcagcgcaggcatctttgttaaaaatggtccggcaattagcaccatcagcaaagatatttttggcgaatggaatgtgatccgcgataaatggaatgccgaatatgatgatatccacctgaaaaaaaaggccgtggtgaccgagaaatatgaagatgatcgtcgtaaaagcttcaagaaaattggtagctttagcctggaacagctgcaagaatatgcagatgcagatctgagcgttgtggaaaaactgaaagaaatcatcattcagaaggtggacgagatctataaagtttatggtagcagcgaaaaactgttcgatgcagattttgttctggaaaaaagcctgaaaaagaatgatgccgttgtggccattatgaaagatctgctggatagcgttaagagcttcgagaattacatcaaagccttttttggtgagggcaaagaaaccaatcgtgatgaaagtttctatggcgattttgtgctggcctatgatattctgctgaaagtggaccatatttatgatgccattcgcaattatgttacccagaaaccgtatagcaaagacaagttcaaactgtactttcagaacccgcagtttatgggtggttgggataaagataaagaaaccgattatcgtgccaccatcctgcgttatggtagtaaatactatctggccatcatggacaaaaaatacgcaaaatgcctgcagaaaatcgacaaagatgatgtgaatggcaactatgaaaaaatcaactacaaactgctgcctggtccgaataaaatgctgccgaaagtgttctttagcaagaaatggatggcctattataacccgagcgaggatattcaaaagatctacaaaaatggcacctttaaaaagggcgacatgttcaatctgaacgattgccacaaactgatcgatttcttcaaagattcaatttcgcgttatccgaaatggtccaatgcctatgattttaactttagcgaaaccgaaaaatacaaagacattgccggtttttatcgcgaagtggaagaacagggctataaagtgagctttgaaagcgcaagcaaaaaagaggttgataagctggttgaagagggcaaactgtatatgttccagatttacaacaaagattttagcgacaaaagccatggcaccccgaatctgcataccatgtactttaaactgctgttcgacgaaaataaccatggtcagattcgtctgagcggtggtgccgaactgtttatgcgtcgtgcaagtctgaaaaaagaagaactggttgttcatccggcaaatagcccgattgcaaacaaaaatccggacaatccgaaaaaaaccacgacactgagctatgatgtgtataaagacaaacgttttagcgaggatcagtatctgctgcatatcccgattgccatcaataaatgcccgaaaaacatctttaagatcaacaccgaagttcgcgtgctgctgaaacatgatgataatccgtatgtgattggcattgatcgtggtgaacgtaacctgctgtatattgttgttgttgatggtaaaggcaacatcgtggaacagtatagtctgaacgaaattatcaacaactttaacggcatccgcatcaaaaccgactatcatagcctgctggacaagaaagaaaaagaacgttttgaagcacgtcagaactggaccagtattgaaaacatcaaagaactgaaagccggttatattagccaggtggttcataaaatctgtgagctggtagaaaaatacgatgcagttattgcactggaagatctgaatagcggtttcaaaaatagccgtgtgaaagtcgaaaaacaggtgtatcagaaattcgagaaaatgctgatcgacaaactgaactacatggtcgacaaaaaaagcaatccgtgtgcaaccggtggtgcactgaaaggttatcagattaccaacaaatttgaaagctttaaaagcatgagcacccagaacggctttatcttctatattccggcatggctgaccagcaaaattgatccgagcaccggttttgtgaacctgctgaaaacaaaatatacctccattgccgacagcaagaagtttattagcagctttgatcgcattatgtatgttccggaagaggacctgtttgaattcgcactggattacaaaaatttcagccgtaccgatgccgactacatcaaaaaatggaaactgtacagctatggtaaccgcattcgcatttttcgcaacccgaagaaaaacaatgtgttcgattgggaagaagtttgtctgaccagcgcatataaagaacttttcaacaaatacggcatcaactatcagcagggtgatattcgtgcactgctgtgtgaacagagcgataaagcgttttatagcagttttatggcactgatgagcctgatgctgcagatgcgtaatagcattaccggtcgcaccgatgtggattttctgattagtccggtgaaaaattccgatggcatcttttatgatagccgcaattacgaagcacaagaaaatgcaattctgccgaaaaacgcagatgcaaatggtgcatataacattgcacgtaaagttctgtgggcaattggccagtttaagaaagcagaagatgagaagctggacaaagtgaaaattgcgatcagcaataaagagtggctggaatacgcacagaccagcgttaaacatgcacctgcgatggtgagcaaaggtgaagaggataatatggccatcatcaaagaattcatgcgcttcaaagttcatatggaaggtagcgttaatggccacgaatttgaaattgaaggtgaaggcgaaggtcgtccgtatgaaggcacccagaccgcaaaactgaaagttaccaaaggtggtccgctgccgtttgcatgggatattctgagtccgcagtttatgtatggtagcaaagcctatgttaaacatccggcagatatcccggattatctgaaactgagctttccggaaggttttaaatgggaacgtgtgatgaattttgaagatggtggtgttgttaccgttacacaggatagcagcctgcaggatggtgaatttatctataaagttaaactgcgtggcacgaattttccgagtgatggtccggttatgcagaaaaaaaccatgggttgggaagcaagcagcgaacgtatgtatccggaagatggcgcactgaaaggtgaaattaaacagcgtctgaagctgaaagatggcggtcattatgatgcagaagttaaaaccacctacaaagccaaaaaaccggttcagctgcctggtgcatataacgttaacattaaactggatatcaccagccacaacgaggattataccattgttgaacagtatgaacgtgcagaaggtcgccatagtaccggtggtatggatgaactgtataaa

SEQ ID NO: 417 - DNA, 4407 bp, synthetic construct
  misc_feature 1..4407: note = SYNTHETIC
  source 1..4407: mol_type = other DNA
atgagcaaactggaaaagttcaccaactgttatagcctgagcaaaaccctgcgttttaaagcaattccggttggtaaaacccaagagaacattgataataaacgcctgctggtcgaagatgaaaaacgcgctgaagattataaaggcgtgaaaaaactgctggatcgctattatctgagcttcattaacgatgtgctgcacagcattaaactgaagaacctgaacaactatatcagcctgtttcgtaaaaaaacccgcaccgaaaaagaaaacaaagagctggaaaacctggaaatcaatctgcgtaaagaaatcgccaaagcgtttaaaggtaacgagggttataaaagcctgttcaagaaagacatcatcgaaaccattctgccggaatttctggatgataaagatgaaattgccctggtgaatagctttaatggctttaccaccgcatttaccggcttttttgataatcgcgaaaacatgttcagcgaagaagcaaaaagcaccagcattgcatttcgctgcattaatgaaaatctgacccgctacattagcaacatggatatctttgaaaaagtggacgcgatcttcgataaacacgaagtgcaagagatcaaagagaaaatcctgaacagcgattatgacgtcgaagatttttttgaaggcgagttctttaacttcgttctgacccaagaaggtatcgacgtttataacgcaattattggtggttttgttaccgaaagcggtgagaaaatcaaaggcctgaatgaatatatcaacctgtataaccagaaaaccaaacagaaactgccgaaattcaaaccgctgtataaacaggttctgagcgatcgtgaaagcctgagcttttatggtgaaggttataccagtgatgaagaggttctggaagtttttcgtaacaccctgaataaaaacagcgagatctttagcagcatcaaaaagcttgagaaactgttcaaaaactttgatgagtatagcagcgcaggcatctttgttaaaaatggtccggcaattagcaccatcagcaaagatatttttggcgaatggaatgtgatccgcgataaatggaatgccgaatatgatgatatccacctgaaaaaaaaggccgtggtgaccgagaaatatgaagatgatcgtcgtaaaagcttcaagaaaattggtagctttagcctggaacagctgcaagaatatgcagatgcagatctgagcgttgtggaaaaactgaaagaaatcatcattcagaaggtggacgagatctataaagtttatggtagcagcgaaaaactgttcgatgcagattttgttctggaaaaaagcctgaaaaagaatgatgccgttgtggccattatgaaagatctgctggatagcgttaagagcttcgagaattacatcaaagccttttttggtgagggcaaagaaaccaatcgtgatgaaagtttctatggcgattttgtgctggcctatgatattctgctgaaagtggaccatatttatgatgccattcgcaattatgttacccagaaaccgtatagcaaagacaagttcaaactgtactttcagaacccgcagtttatgggtggttgggataaagataaagaaaccgattatcgtgccaccatcctgcgttatggtagtaaatactatctggccatcatggacaaaaaatacgcaaaatgcctgcagaaaatcgacaaagatgatgtgaatggcaactatgaaaaaatcaactacaaactgctgcctggtccgaataaaatgctgccgaaagtgttctttagcaagaaatggatggcctattataacccgagcgaggatattcaaaagatctacaaaaatggcacctttaaaaagggcgacatgttcaatctgaacgattgccacaaactgatcgatttcttcaaagattcaatttcgcgttatccgaaatggtccaatgcctatgattttaactttagcgaaaccgaaaaatacaaagacattgccggtttttatcgcgaagtggaagaacagggctataaagtgagctttgaaagcgcaagcaaaaaagaggttgataagctggttgaagagggcaaactgtatatgttccagatttacaacaaagattttagcgacaaaagccatggcaccccgaatctgcataccatgtactttaaactgctgttcgacgaaaataaccatggtcagattcgtctgagcggtggtgccgaactgtttatgcgtcgtgcaagtctgaaaaaagaagaactggttgttcatccggcaaatagcccgattgcaaacaaaaatccggacaatccgaaaaaaaccacgacactgagctatgatgtgtataaagacaaacgttttagcgaggatcagtatctgctgcatatcccgattgccatcaataaatgcccgaaaaacatctttaagatcaacaccgaagttcgcgtgctgctgaaacatgatgataatccgtatgtgattggcattgatcgtggtgaacgtaacctgctgtatattgttgttgttgatggtaaaggcaacatcgtggaacagtatagtctgaacgaaattatcaacaactttaacggcatccgcatcaaaaccgactatcatagcctgctggacaagaaagaaaaagaacgttttgaagcacgtcagaactggaccagtattgaaaacatcaaagaactgaaagccggttatattagccaggtggttcataaaatctgtgagctggtagaaaaatacgatgcagttattgcactggaagatctgaatagcggtttcaaaaatagccgtgtgaaagtcgaaaaacaggtgtatcagaaattcgagaaaatgctgatcgacaaactgaactacatggtcgacaaaaaaagcaatccgtgtgcaaccggtggtgcactgaaaggttatcagattaccaacaaatttgaaagctttaaaagcatgagcacccagaacggctttatcttctatattccggcatggctgaccagcaaaattgatccgagcaccggttttgtgaacctgctgaaaacaaaatatacctccattgccgacagcaagaagtttattagcagctttgatcgcattatgtatgttccggaagaggacctgtttgaattcgcactggattacaaaaatttcagccgtaccgatgccgactacatcaaaaaatggaaactgtacagctatggtaaccgcattcgcatttttcgcaacccgaagaaaaacaatgtgttcgattgggaagaagtttgtctgaccagcgcatataaagaacttttcaacaaatacggcatcaactatcagcagggtgatattcgtgcactgctgtgtgaacagagcgataaagcgttttatagcagttttatggcactgatgagcctgatgctgcagatgcgtaatagcattaccggtcgcaccgatgtggattttctgattagtccggtgaaaaattccgatggcatcttttatgatagccgcaattacgaagcacaagaaaatgcaattctgccgaaaaacgcagatgcaaatggtgcatataacattgcacgtaaagttctgtgggcaattggccagtttaagaaagcagaagatgagaagctggacaaagtgaaaattgcgatcagcaataaagagtggctggaatacgcacagaccagcgttaaacatgctcctgcacctgcgatggtgagcaaaggtgaagaggataatatggccatcatcaaagaattcatgcgcttcaaagttcatatggaaggtagcgttaatggccacgaatttgaaattgaaggtgaaggcgaaggtcgtccgtatgaaggcacccagaccgcaaaactgaaagttaccaaaggtggtccgctgccgtttgcatgggatattctgagtccgcagtttatgtatggtagcaaagcctatgttaaacatccggcagatatcccggattatctgaaactgagctttccggaaggttttaaatgggaacgtgtgatgaattttgaagatggtggtgttgttaccgttacacaggatagcagcctgcaggatggtgaatttatctataaagttaaactgcgtggcacgaattttccgagtgatggtccggttatgcagaaaaaaaccatgggttgggaagcaagcagcgaacgtatgtatccggaagatggcgcactgaaaggtgaaattaaacagcgtctgaagctgaaagatggcggtcattatgatgcagaagttaaaaccacctacaaagccaaaaaaccggttcagctgcctggtgcatataacgttaacattaaactggatatcaccagccacaacgaggattataccattgttgaacagtatgaacgtgcagaaggtcgccatagtaccggtggtatggatgaactgtataaa

SEQ ID NO: 418 - DNA, 4413 bp, synthetic construct
  misc_feature 1..4413: note = SYNTHETIC
  source 1..4413: mol_type = other DNA
atgagcaaactggaaaagttcaccaactgttatagcctgagcaaaaccctgcgttttaaagcaattccggttggtaaaacccaagagaacattgataataaacgcctgctggtcgaagatgaaaaacgcgctgaagattataaaggcgtgaaaaaactgctggatcgctattatctgagcttcattaacgatgtgctgcacagcattaaactgaagaacctgaacaactatatcagcctgtttcgtaaaaaaacccgcaccgaaaaagaaaacaaagagctggaaaacctggaaatcaatctgcgtaaagaaatcgccaaagcgtttaaaggtaacgagggttataaaagcctgttcaagaaagacatcatcgaaaccattctgccggaatttctggatgataaagatgaaattgccctggtgaatagctttaatggctttaccaccgcatttaccggcttttttgataatcgcgaaaacatgttcagcgaagaagcaaaaagcaccagcattgcatttcgctgcattaatgaaaatctgacccgctacattagcaacatggatatctttgaaaaagtggacgcgatcttcgataaacacgaagtgcaagagatcaaagagaaaatcctgaacagcgattatgacgtcgaagatttttttgaaggcgagttctttaacttcgttctgacccaagaaggtatcgacgtttataacgcaattattggtggttttgttaccgaaagcggtgagaaaatcaaaggcctgaatgaatatatcaacctgtataaccagaaaaccaaacagaaactgccgaaattcaaaccgctgtataaacaggttctgagcgatcgtgaaagcctgagcttttatggtgaaggttataccagtgatgaagaggttctggaagtttttcgtaacaccctgaataaaaacagcgagatctttagcagcatcaaaaagcttgagaaactgttcaaaaactttgatgagtatagcagcgcaggcatctttgttaaaaatggtccggcaattagcaccatcagcaaagatatttttggcgaatggaatgtgatccgcgataaatggaatgccgaatatgatgatatccacctgaaaaaaaaggccgtggtgaccgagaaatatgaagatgatcgtcgtaaaagcttcaagaaaattggtagctttagcctggaacagctgcaagaatatgcagatgcagatctgagcgttgtggaaaaactgaaagaaatcatcattcagaaggtggacgagatctataaagtttatggtagcagcgaaaaactgttcgatgcagattttgttctggaaaaaagcctgaaaaagaatgatgccgttgtggccattatgaaagatctgctggatagcgttaagagcttcgagaattacatcaaagccttttttggtgagggcaaagaaaccaatcgtgatgaaagtttctatggcgattttgtgctggcctatgatattctgctgaaagtggaccatatttatgatgccattcgcaattatgttacccagaaaccgtatagcaaagacaagttcaaactgtactttcagaacccgcagtttatgggtggttgggataaagataaagaaaccgattatcgtgccaccatcctgcgttatggtagtaaatactatctggccatcatggacaaaaaatacgcaaaatgcctgcagaaaatcgacaaagatgatgtgaatggcaactatgaaaaaatcaactacaaactgctgcctggtccgaataaaatgctgccgaaagtgttctttagcaagaaatggatggcctattataacccgagcgaggatattcaaaagatctacaaaaatggcacctttaaaaagggcgacatgttcaatctgaacgattgccacaaactgatcgatttcttcaaagattcaatttcgcgttatccgaaatggtccaatgcctatgattttaactttagcgaaaccgaaaaatacaaagacattgccggtttttatcgcgaagtggaagaacagggctataaagtgagctttgaaagcgcaagcaaaaaagaggttgataagctggttgaagagggcaaactgtatatgttccagatttacaacaaagattttagcgacaaaagccatggcaccccgaatctgcataccatgtactttaaactgctgttcgacgaaaataaccatggtcagattcgtctgagcggtggtgccgaactgtttatgcgtcgtgcaagtctgaaaaaagaagaactggttgttcatccggcaaatagcccgattgcaaacaaaaatccggacaatccgaaaaaaaccacgacactgagctatgatgtgtataaagacaaacgttttagcgaggatcagtatctgctgcatatcccgattgccatcaataaatgcccgaaaaacatctttaagatcaacaccgaagttcgcgtgctgctgaaacatgatgataatccgtatgtgattggcattgatcgtggtgaacgtaacctgctgtatattgttgttgttgatggtaaaggcaacatcgtggaacagtatagtctgaacgaaattatcaacaactttaacggcatccgcatcaaaaccgactatcatagcctgctggacaagaaagaaaaagaacgttttgaagcacgtcagaactggaccagtattgaaaacatcaaagaactgaaagccggttatattagccaggtggttcataaaatctgtgagctggtagaaaaatacgatgcagttattgcactggaagatctgaatagcggtttcaaaaatagccgtgtgaaagtcgaaaaacaggtgtatcagaaattcgagaaaatgctgatcgacaaactgaactacatggtcgacaaaaaaagcaatccgtgtgcaaccggtggtgcactgaaaggttatcagattaccaacaaatttgaaagctttaaaagcatgagcacccagaacggctttatcttctatattccggcatggctgaccagcaaaattgatccgagcaccggttttgtgaacctgctgaaaacaaaatatacctccattgccgacagcaagaagtttattagcagctttgatcgcattatgtatgttccggaagaggacctgtttgaattcgcactggattacaaaaatttcagccgtaccgatgccgactacatcaaaaaatggaaactgtacagctatggtaaccgcattcgcatttttcgcaacccgaagaaaaacaatgtgttcgattgggaagaagtttgtctgaccagcgcatataaagaacttttcaacaaatacggcatcaactatcagcagggtgatattcgtgcactgctgtgtgaacagagcgataaagcgttttatagcagttttatggcactgatgagcctgatgctgcagatgcgtaatagcattaccggtcgcaccgatgtggattttctgattagtccggtgaaaaattccgatggcatcttttatgatagccgcaattacgaagcacaagaaaatgcaattctgccgaaaaacgcagatgcaaatggtgcatataacattgcacgtaaagttctgtgggcaattggccagtttaagaaagcagaagatgagaagctggacaaagtgaaaattgcgatcagcaataaagagtggctggaatacgcacagaccagcgttaaacatgcgccagctcctgcacctgcgatggtgagcaaaggtgaagaggataatatggccatcatcaaagaattcatgcgcttcaaagttcatatggaaggtagcgttaatggccacgaatttgaaattgaaggtgaaggcgaaggtcgtccgtatgaaggcacccagaccgcaaaactgaaagttaccaaaggtggtccgctgccgtttgcatgggatattctgagtccgcagtttatgtatggtagcaaagcctatgttaaacatccggcagatatcccggattatctgaaactgagctttccggaaggttttaaatgggaacgtgtgatgaattttgaagatggtggtgttgttaccgttacacaggatagcagcctgcaggatggtgaatttatctataaagttaaactgcgtggcacgaattttccgagtgatggtccggttatgcagaaaaaaaccatgggttgggaagcaagcagcgaacgtatgtatccggaagatggcgcactgaaaggtgaaattaaacagcgtctgaagctgaaagatggcggtcattatgatgcagaagttaaaaccacctacaaagccaaaaaaccggttcagctgcctggtgcatataacgttaacattaaactggatatcaccagccacaacgaggattataccattgttgaacagtatgaacgtgcagaaggtcgccatagtaccggtggtatggatgaactgtataaa

SEQ ID NO: 419 - DNA, 4419 bp, synthetic construct
  misc_feature 1..4419: note = SYNTHETIC
  source 1..4419: mol_type = other DNA
atgagcaaactggaaaagttcaccaactgttatagcctgagcaaaaccctgcgttttaaagcaattccggttggtaaaacccaagagaacattgataataaacgcctgctggtcgaagatgaaaaacgcgctgaagattataaaggcgtgaaaaaactgctggatcgctattatctgagcttcattaacgatgtgctgcacagcattaaactgaagaacctgaacaactatatcagcctgtttcgtaaaaaaacccgcaccgaaaaagaaaacaaagagctggaaaacctggaaatcaatctgcgtaaagaaatcgccaaagcgtttaaaggtaacgagggttataaaagcctgttcaagaaagacatcatcgaaaccattctgccggaatttctggatgataaagatgaaattgccctggtgaatagctttaatggctttaccaccgcatttaccggcttttttgataatcgcgaaaacatgttcagcgaagaagcaaaaagcaccagcattgcatttcgctgcattaatgaaaatctgacccgctacattagcaacatggatatctttgaaaaagtggacgcgatcttcgataaacacgaagtgcaagagatcaaagagaaaatcctgaacagcgattatgacgtcgaagatttttttgaaggcgagttctttaacttcgttctgacccaagaaggtatcgacgtttataacgcaattattggtggttttgttaccgaaagcggtgagaaaatcaaaggcctgaatgaatatatcaacctgtataaccagaaaaccaaacagaaactgccgaaattcaaaccgctgtataaacaggttctgagcgatcgtgaaagcctgagcttttatggtgaaggttataccagtgatgaagaggttctggaagtttttcgtaacaccctgaataaaaacagcgagatctttagcagcatcaaaaagcttgagaaactgttcaaaaactttgatgagtatagcagcgcaggcatctttgttaaaaatggtccggcaattagcaccatcagcaaagatatttttggcgaatggaatgtgatccgcgataaatggaatgccgaatatgatgatatccacctgaaaaaaaaggccgtggtgaccgagaaatatgaagatgatcgtcgtaaaagcttcaagaaaattggtagctttagcctggaacagctgcaagaatatgcagatgcagatctgagcgttgtggaaaaactgaaagaaatcatcattcagaaggtggacgagatctataaagtttatggtagcagcgaaaaactgttcgatgcagattttgttctggaaaaaagcctgaaaaagaatgatgccgttgtggccattatgaaagatctgctggatagcgttaagagcttcgagaattacatcaaagccttttttggtgagggcaaagaaaccaatcgtgatgaaagtttctatggcgattttgtgctggcctatgatattctgctgaaagtggaccatatttatgatgccattcgcaattatgttacccagaaaccgtatagcaaagacaagttcaaactgtactttcagaacccgcagtttatgggtggttgggataaagataaagaaaccgattatcgtgccaccatcctgcgttatggtagtaaatactatctggccatcatggacaaaaaatacgcaaaatgcctgcagaaaatcgacaaagatgatgtgaatggcaactatgaaaaaatcaactacaaactgctgcctggtccgaataaaatgctgccgaaagtgttctttagcaagaaatggatggcctattataacccgagcgaggatattcaaaagatctacaaaaatggcacctttaaaaagggcgacatgttcaatctgaacgattgccacaaactgatcgatttcttcaaagattcaatttcgcgttatccgaaatggtccaatgcctatgattttaactttagcgaaaccgaaaaatacaaagacattgccggtttttatcgcgaagtggaagaacagggctataaagtgagctttgaaagcgcaagcaaaaaagaggttgataagctggttgaagagggcaaactgtatatgttccagatttacaacaaagattttagcgacaaaagccatggcaccccgaatctgcataccatgtactttaaactgctgttcgacgaaaataaccatggtcagattcgtctgagcggtggtgccgaactgtttatgcgtcgtgcaagtctgaaaaaagaagaactggttgttcatccggcaaatagcccgattgcaaacaaaaatccggacaatccgaaaaaaaccacgacactgagctatgatgtgtataaagacaaacgttttagcgaggatcagtatctgctgcatatcccgattgccatcaataaatgcccgaaaaacatctttaagatcaacaccgaagttcgcgtgctgctgaaacatgatgataatccgtatgtgattggcattgatcgtggtgaacgtaacctgctgtatattgttgttgttgatggtaaaggcaacatcgtggaacagtatagtctgaacgaaattatcaacaactttaacggcatccgcatcaaaaccgactatcatagcctgctggacaagaaagaaaaagaacgttttgaagcacgtcagaactggaccagtattgaaaacatcaaagaactgaaagccggttatattagccaggtggttcataaaatctgtgagctggtagaaaaatacgatgcagttattgcactggaagatctgaatagcggtttcaaaaatagccgtgtgaaagtcgaaaaacaggtgtatcagaaattcgagaaaatgctgatcgacaaactgaactacatggtcgacaaaaaaagcaatccgtgtgcaaccggtggtgcactgaaaggttatcagattaccaacaaatttgaaagctttaaaagcatgagcacccagaacggctttatcttctatattccggcatggctgaccagcaaaattgatccgagcaccggttttgtgaacctgctgaaaacaaaatatacctccattgccgacagcaagaagtttattagcagctttgatcgcattatgtatgttccggaagaggacctgtttgaattcgcactggattacaaaaatttcagccgtaccgatgccgactacatcaaaaaatggaaactgtacagctatggtaaccgcattcgcatttttcgcaacccgaagaaaaacaatgtgttcgattgggaagaagtttgtctgaccagcgcatataaagaacttttcaacaaatacggcatcaactatcagcagggtgatattcgtgcactgctgtgtgaacagagcgataaagcgttttatagcagttttatggcactgatgagcctgatgctgcagatgcgtaatagcattaccggtcgcaccgatgtggattttctgattagtccggtgaaaaattccgatggcatcttttatgatagccgcaattacgaagcacaagaaaatgcaattctgccgaaaaacgcagatgcaaatggtgcatataacattgcacgtaaagttctgtgggcaattggccagtttaagaaagcagaagatgagaagctggacaaagtgaaaattgcgatcagcaataaagagtggctggaatacgcacagaccagcgttaaacatgctcctgcgccagctcctgcacctgcgatggtgagcaaaggtgaagaggataatatggccatcatcaaagaattcatgcgcttcaaagttcatatggaaggtagcgttaatggccacgaatttgaaattgaaggtgaaggcgaaggtcgtccgtatgaaggcacccagaccgcaaaactgaaagttaccaaaggtggtccgctgccgtttgcatgggatattctgagtccgcagtttatgtatggtagcaaagcctatgttaaacatccggcagatatcccggattatctgaaactgagctttccggaaggttttaaatgggaacgtgtgatgaattttgaagatggtggtgttgttaccgttacacaggatagcagcctgcaggatggtgaatttatctataaagttaaactgcgtggcacgaattttccgagtgatggtccggttatgcagaaaaaaaccatgggttgggaagcaagcagcgaacgtatgtatccggaagatggcgcactgaaaggtgaaattaaacagcgtctgaagctgaaagatggcggtcattatgatgcagaagttaaaaccacctacaaagccaaaaaaccggttcagctgcctggtgcatataacgttaacattaaactggatatcaccagccacaacgaggattataccattgttgaacagtatgaacgtgcagaaggtcgccatagtaccggtggtatggatgaactgtataaa

SEQ ID NO: 420 - DNA, 4425 bp, synthetic construct
  misc_feature 1..4425: note = SYNTHETIC
  source 1..4425: mol_type = other DNA
atgagcaaactggaaaagttcaccaactgttatagcctgagcaaaaccctgcgttttaaagcaattccggttggtaaaacccaagagaacattgataataaacgcctgctggtcgaagatgaaaaacgcgctgaagattataaaggcgtgaaaaaactgctggatcgctattatctgagcttcattaacgatgtgctgcacagcattaaactgaagaacctgaacaactatatcagcctgtttcgtaaaaaaacccgcaccgaaaaagaaaacaaagagctggaaaacctggaaatcaatctgcgtaaagaaatcgccaaagcgtttaaaggtaacgagggttataaaagcctgttcaagaaagacatcatcgaaaccattctgccggaatttctggatgataaagatgaaattgccctggtgaatagctttaatggctttaccaccgcatttaccggcttttttgataatcgcgaaaacatgttcagcgaagaagcaaaaagcaccagcattgcatttcgctgcattaatgaaaatctgacccgctacattagcaacatggatatctttgaaaaagtggacgcgatcttcgataaacacgaagtgcaagagatcaaagagaaaatcctgaacagcgattatgacgtcgaagatttttttgaaggcgagttctttaacttcgttctgacccaagaaggtatcgacgtttataacgcaattattggtggttttgttaccgaaagcggtgagaaaatcaaaggcctgaatgaatatatcaacctgtataaccagaaaaccaaacagaaactgccgaaattcaaaccgctgtataaacaggttctgagcgatcgtgaaagcctgagcttttatggtgaaggttataccagtgatgaagaggttctggaagtttttcgtaacaccctgaataaaaacagcgagatctttagcagcatcaaaaagcttgagaaactgttcaaaaactttgatgagtatagcagcgcaggcatctttgttaaaaatggtccggcaattagcaccatcagcaaagatatttttggcgaatggaatgtgatccgcgataaatggaatgccgaatatgatgatatccacctgaaaaaaaaggccgtggtgaccgagaaatatgaagatgatcgtcgtaaaagcttcaagaaaattggtagctttagcctggaacagctgcaagaatatgcagatgcagatctgagcgttgtggaaaaactgaaagaaatcatcattcagaaggtggacgagatctataaagtttatggtagcagcgaaaaactgttcgatgcagattttgttctggaaaaaagcctgaaaaagaatgatgccgttgtggccattatgaaagatctgctggatagcgttaagagcttcgagaattacatcaaagccttttttggtgagggcaaagaaaccaatcgtgatgaaagtttctatggcgattttgtgctggcctatgatattctgctgaaagtggaccatatttatgatgccattcgcaattatgttacccagaaaccgtatagcaaagacaagttcaaactgtactttcagaacccgcagtttatgggtggttgggataaagataaagaaaccgattatcgtgccaccatcctgcgttatggtagtaaatactatctggccatcatggacaaaaaatacgcaaaatgcctgcagaaaatcgacaaagatgatgtgaatggcaactatgaaaaaatcaactacaaactgctgcctggtccgaataaaatgctgccgaaagtgttctttagcaagaaatggatggcctattataacccgagcgaggatattcaaaagatctacaaaaatggcacctttaaaaagggcgacatgttcaatctgaacgattgccacaaactgatcgatttcttcaaagattcaatttcgcgttatccgaaatggtccaatgcctatgattttaactttagcgaaaccgaaaaatacaaagacattgccggtttttatcgcgaagtggaagaacagggctataaagtgagctttgaaagcgcaagcaaaaaagaggttgataagctggttgaagagggcaaactgtatatgttccagatttacaacaaagattttagcgacaaaagccatggcaccccgaatctgcataccatgtactttaaactgctgttcgacgaaaataaccatggtcagattcgtctgagcggtggtgccgaactgtttatgcgtcgtgcaagtctgaaaaaagaagaactggttgttcatccggcaaatagcccgattgcaaacaaaaatccggacaatccgaaaaaaaccacgacactgagctatgatgtgtataaagacaaacgttttagcgaggatcagtatctgctgcatatcccgattgccatcaataaatgcccgaaaaacatctttaagatcaacaccgaagttcgcgtgctgctgaaacatgatgataatccgtatgtgattggcattgatcgtggtgaacgtaacctgctgtatattgttgttgttgatggtaaaggcaacatcgtggaacagtatagtctgaacgaaattatcaacaactttaacggcatccgcatcaaaaccgactatcatagcctgctggacaagaaagaaaaagaacgttttgaagcacgtcagaactggaccagtattgaaaacatcaaagaactgaaagccggttatattagccaggtggttcataaaatctgtgagctggtagaaaaatacgatgcagttattgcactggaagatctgaatagcggtttcaaaaatagccgtgtgaaagtcgaaaaacaggtgtatcagaaattcgagaaaatgctgatcgacaaactgaactacatggtcgacaaaaaaagcaatccgtgtgcaaccggtggtgcactgaaaggttatcagattaccaacaaatttgaaagctttaaaagcatgagcacccagaacggctttatcttctatattccggcatggctgaccagcaaaattgatccgagcaccggttttgtgaacctgctgaaaacaaaatatacctccattgccgacagcaagaagtttattagcagctttgatcgcattatgtatgttccggaagaggacctgtttgaattcgcactggattacaaaaatttcagccgtaccgatgccgactacatcaaaaaatggaaactgtacagctatggtaaccgcattcgcatttttcgcaacccgaagaaaaacaatgtgttcgattgggaagaagtttgtctgaccagcgcatataaagaacttttcaacaaatacggcatcaactatcagcagggtgatattcgtgcactgctgtgtgaacagagcgataaagcgttttatagcagttttatggcactgatgagcctgatgctgcagatgcgtaatagcattaccggtcgcaccgatgtggattttctgattagtccggtgaaaaattccgatggcatcttttatgatagccgcaattacgaagcacaagaaaatgcaattctgccgaaaaacgcagatgcaaatggtgcatataacattgcacgtaaagttctgtgggcaattggccagtttaagaaagcagaagatgagaagctggacaaagtgaaaattgcgatcagcaataaagagtggctggaatacgcacagaccagcgttaaacatgcgcccgctcctgcgccagctcctgcacctgcgatggtgagcaaaggtgaagaggataatatggccatcatcaaagaattcatgcgcttcaaagttcatatggaaggtagcgttaatggccacgaatttgaaattgaaggtgaaggcgaaggtcgtccgtatgaaggcacccagaccgcaaaactgaaagttaccaaaggtggtccgctgccgtttgcatgggatattctgagtccgcagtttatgtatggtagcaaagcctatgttaaacatccggcagatatcccggattatctgaaactgagctttccggaaggttttaaatgggaacgtgtgatgaattttgaagatggtggtgttgttaccgttacacaggatagcagcctgcaggatggtgaatttatctataaagttaaactgcgtggcacgaattttccgagtgatggtccggttatgcagaaaaaaaccatgggttgggaagcaagcagcgaacgtatgtatccggaagatggcgcactgaaaggtgaaattaaacagcgtctgaagctgaaagatggcggtcattatgatgcagaagttaaaaccacctacaaagccaaaaaaccggttcagctgcctggtgcatataacgttaacattaaactggatatcaccagccacaacgaggattataccattgttgaacagtatgaacgtgcagaaggtcgccatagtaccggtggtatggatgaactgtataaa

SEQ ID NO: 421 - DNA, 4431 bp, synthetic construct
  misc_feature 1..4431: note = SYNTHETIC
  source 1..4431: mol_type = other DNA
atgagcaaactggaaaagttcaccaactgttatagcctgagcaaaaccctgcgttttaaagcaattccggttggtaaaacccaagagaacattgataataaacgcctgctggtcgaagatgaaaaacgcgctgaagattataaaggcgtgaaaaaactgctggatcgctattatctgagcttcattaacgatgtgctgcacagcattaaactgaagaacctgaacaactatatcagcctgtttcgtaaaaaaacccgcaccgaaaaagaaaacaaagagctggaaaacctggaaatcaatctgcgtaaagaaatcgccaaagcgtttaaaggtaacgagggttataaaagcctgttcaagaaagacatcatcgaaaccattctgccggaatttctggatgataaagatgaaattgccctggtgaatagctttaatggctttaccaccgcatttaccggcttttttgataatcgcgaaaacatgttcagcgaagaagcaaaaagcaccagcattgcatttcgctgcattaatgaaaatctgacccgctacattagcaacatggatatctttgaaaaagtggacgcgatcttcgataaacacgaagtgcaagagatcaaagagaaaatcctgaacagcgattatgacgtcgaagatttttttgaaggcgagttctttaacttcgttctgacccaagaaggtatcgacgtttataacgcaattattggtggttttgttaccgaaagcggtgagaaaatcaaaggcctgaatgaatatatcaacctgtataaccagaaaaccaaacagaaactgccgaaattcaaaccgctgtataaacaggttctgagcgatcgtgaaagcctgagcttttatggtgaaggttataccagtgatgaagaggttctggaagtttttcgtaacaccctgaataaaaacagcgagatctttagcagcatcaaaaagcttgagaaactgttcaaaaactttgatgagtatagcagcgcaggcatctttgttaaaaatggtccggcaattagcaccatcagcaaagatatttttggcgaatggaatgtgatccgcgataaatggaatgccgaatatgatgatatccacctgaaaaaaaaggccgtggtgaccgagaaatatgaagatgatcgtcgtaaaagcttcaagaaaattggtagctttagcctggaacagctgcaagaatatgcagatgcagatctgagcgttgtggaaaaactgaaagaaatcatcattcagaaggtggacgagatctataaagtttatggtagcagcgaaaaactgttcgatgcagattttgttctggaaaaaagcctgaaaaagaatgatgccgttgtggccattatgaaagatctgctggatagcgttaagagcttcgagaattacatcaaagccttttttggtgagggcaaagaaaccaatcgtgatgaaagtttctatggcgattttgtgctggcctatgatattctgctgaaagtggaccatatttatgatgccattcgcaattatgttacccagaaaccgtatagcaaagacaagttcaaactgtactttcagaacccgcagtttatgggtggttgggataaagataaagaaaccgattatcgtgccaccatcctgcgttatggtagtaaatactatctggccatcatggacaaaaaatacgcaaaatgcctgcagaaaatcgacaaagatgatgtgaatggcaactatgaaaaaatcaactacaaactgctgcctggtccgaataaaatgctgccgaaagtgttctttagcaagaaatggatggcctattataacccgagcgaggatattcaaaagatctacaaaaatggcacctttaaaaagggcgacatgttcaatctgaacgattgccacaaactgatcgatttcttcaaagattcaatttcgcgttatccgaaatggtccaatgcctatgattttaactttagcgaaaccgaaaaatacaaagacattgccggtttttatcgcgaagtggaagaacagggctataaagtgagctttgaaagcgcaagcaaaaaagaggttgataagctggttgaagagggcaaactgtatatgttccagatttacaacaaagattttagcgacaaaagccatggcaccccgaatctgcataccatgtactttaaactgctgttcgacgaaaataaccatggtcagattcgtctgagcggtggtgccgaactgtttatgcgtcgtgcaagtctgaaaaaagaagaactggttgttcatccggcaaatagcccgattgcaaacaaaaatccggacaatccgaaaaaaaccacgacactgagctatgatgtgtataaagacaaacgttttagcgaggatcagtatctgctgcatatcccgattgccatcaataaatgcccgaaaaacatctttaagatcaacaccgaagttcgcgtgctgctgaaacatgatgataatccgtatgtgattggcattgatcgtggtgaacgtaacctgctgtatattgttgttgttgatggtaaaggcaacatcgtggaacagtatagtctgaacgaaattatcaacaactttaacggcatccgcatcaaaaccgactatcatagcctgctggacaagaaagaaaaagaacgttttgaagcacgtcagaactggaccagtattgaaaacatcaaagaactgaaagccggttatattagccaggtggttcataaaatctgtgagctggtagaaaaatacgatgcagttattgcactggaagatctgaatagcggtttcaaaaatagccgtgtgaaagtcgaaaaacaggtgtatcagaaattcgagaaaatgctgatcgacaaactgaactacatggtcgacaaaaaaagcaatccgtgtgcaaccggtggtgcactgaaaggttatcagattaccaacaaatttgaaagctttaaaagcatgagcacccagaacggctttatcttctatattccggcatggctgaccagcaaaattgatccgagcaccggttttgtgaacctgctgaaaacaaaatatacctccattgccgacagcaagaagtttattagcagctttgatcgcattatgtatgttccggaagaggacctgtttgaattcgcactggattacaaaaatttcagccgtaccgatgccgactacatcaaaaaatggaaactgtacagctatggtaaccgcattcgcatttttcgcaacccgaagaaaaacaatgtgttcgattgggaagaagtttgtctgaccagcgcatataaagaacttttcaacaaatacggcatcaactatcagcagggtgatattcgtgcactgctgtgtgaacagagcgataaagcgttttatagcagttttatggcactgatgagcctgatgctgcagatgcgtaatagcattaccggtcgcaccgatgtggattttctgattagtccggtgaaaaattccgatggcatcttttatgatagccgcaattacgaagcacaagaaaatgcaattctgccgaaaaacgcagatgcaaatggtgcatataacattgcacgtaaagttctgtgggcaattggccagtttaagaaagcagaagatgagaagctggacaaagtgaaaattgcgatcagcaataaagagtggctggaatacgcacagaccagcgttaaacatgcgccagcgcctgctcctgcacccgctccagcacctgcgatggtgagcaaaggtgaagaggataatatggccatcatcaaagaattcatgcgcttcaaagttcatatggaaggtagcgttaatggccacgaatttgaaattgaaggtgaaggcgaaggtcgtccgtatgaaggcacccagaccgcaaaactgaaagttaccaaaggtggtccgctgccgtttgcatgggatattctgagtccgcagtttatgtatggtagcaaagcctatgttaaacatccggcagatatcccggattatctgaaactgagctttccggaaggttttaaatgggaacgtgtgatgaattttgaagatggtggtgttgttaccgttacacaggatagcagcctgcaggatggtgaatttatctataaagttaaactgcgtggcacgaattttccgagtgatggtccggttatgcagaaaaaaaccatgggttgggaagcaagcagcgaacgtatgtatccggaagatggcgcactgaaaggtgaaattaaacagcgtctgaagctgaaagatggcggtcattatgatgcagaagttaaaaccacctacaaagccaaaaaaccggttcagctgcctggtgcatataacgttaacattaaactggatatcaccagccacaacgaggattataccattgttgaacagtatgaacgtgcagaaggtcgccatagtaccggtggtatggatgaactgtataaa

SEQ ID NO: 422 - DNA, 4437 bp, synthetic construct
  misc_feature 1..4437: note = SYNTHETIC
  source 1..4437: mol_type = other DNA
atgagcaaactggaaaagttcaccaactgttatagcctgagcaaaaccctgcgttttaaagcaattccggttggtaaaacccaagagaacattgataataaacgcctgctggtcgaagatgaaaaacgcgctgaagattataaaggcgtgaaaaaactgctggatcgctattatctgagcttcattaacgatgtgctgcacagcattaaactgaagaacctgaacaactatatcagcctgtttcgtaaaaaaacccgcaccgaaaaagaaaacaaagagctggaaaacctggaaatcaatctgcgtaaagaaatcgccaaagcgtttaaaggtaacgagggttataaaagcctgttcaagaaagacatcatcgaaaccattctgccggaatttctggatgataaagatgaaattgccctggtgaatagctttaatggctttaccaccgcatttaccggcttttttgataatcgcgaaaacatgttcagcgaagaagcaaaaagcaccagcattgcatttcgctgcattaatgaaaatctgacccgctacattagcaacatggatatctttgaaaaagtggacgcgatcttcgataaacacgaagtgcaagagatcaaagagaaaatcctgaacagcgattatgacgtcgaagatttttttgaaggcgagttctttaacttcgttctgacccaagaaggtatcgacgtttataacgcaattattggtggttttgttaccgaaagcggtgagaaaatcaaaggcctgaatgaatatatcaacctgtataaccagaaaaccaaacagaaactgccgaaattcaaaccgctgtataaacaggttctgagcgatcgtgaaagcctgagcttttatggtgaaggttataccagtgatgaagaggttctggaagtttttcgtaacaccctgaataaaaacagcgagatctttagcagcatcaaaaagcttgagaaactgttcaaaaactttgatgagtatagcagcgcaggcatctttgttaaaaatggtccggcaattagcaccatcagcaaagatatttttggcgaatggaatgtgatccgcgataaatggaatgccgaatatgatgatatccacctgaaaaaaaaggccgtggtgaccgagaaatatgaagatgatcgtcgtaaaagcttcaagaaaattggtagctttagcctggaacagctgcaagaatatgcagatgcagatctgagcgttgtggaaaaactgaaagaaatcatcattcagaaggtggacgagatctataaagtttatggtagcagcgaaaaactgttcgatgcagattttgttctggaaaaaagcctgaaaaagaatgatgccgttgtggccattatgaaagatctgctggatagcgttaagagcttcgagaattacatcaaagccttttttggtgagggcaaagaaaccaatcgtgatgaaagtttctatggcgattttgtgctggcctatgatattctgctgaaagtggaccatatttatgatgccattcgcaattatgttacccagaaaccgtatagcaaagacaagttcaaactgtactttcagaacccgcagtttatgggtggttgggataaagataaagaaaccgattatcgtgccaccatcctgcgttatggtagtaaatactatctggccatcatggacaaaaaatacgcaaaatgcctgcagaaaatcgacaaagatgatgtgaatggcaactatgaaaaaatcaactacaaactgctgcctggtccgaataaaatgctgccgaaagtgttctttagcaagaaatggatggcctattataacccgagcgaggatattcaaaagatctacaaaaatggcacctttaaaaagggcgacatgttcaatctgaacgattgccacaaactgatcgatttcttcaaagattcaatttcgcgttatccgaaatggtccaatgcctatgattttaactttagcgaaaccgaaaaatacaaagacattgccggtttttatcgcgaagtggaagaacagggctataaagtgagctttgaaagcgcaagcaaaaaagaggttgataagctggttgaagagggcaaactgtatatgttccagatttacaacaaagattttagcgacaaaagccatggcaccccgaatctgcataccatgtactttaaactgctgttcgacgaaaataaccatggtcagattcgtctgagcggtggtgccgaactgtttatgcgtcgtgcaagtctgaaaaaagaagaactggttgttcatccggcaaatagcccgattgcaaacaaaaatccggacaatccgaaaaaaaccacgacactgagctatgatgtgtataaagacaaacgttttagcgaggatcagtatctgctgcatatcccgattgccatcaataaatgcccgaaaaacatctttaagatcaacaccgaagttcgcgtgctgctgaaacatgatgataatccgtatgtgattggcattgatcgtggtgaacgtaacctgctgtatattgttgttgttgatggtaaaggcaacatcgtggaacagtatagtctgaacgaaattatcaacaactttaacggcatccgcatcaaaaccgactatcatagcctgctggacaagaaagaaaaagaacgttttgaagcacgtcagaactggaccagtattgaaaacatcaaagaactgaaagccggttatattagccaggtggttcataaaatctgtgagctggtagaaaaatacgatgcagttattgcactggaagatctgaatagcggtttcaaaaatagccgtgtgaaagtcgaaaaacaggtgtatcagaaattcgagaaaatgctgatcgacaaactgaactacatggtcgacaaaaaaagcaatccgtgtgcaaccggtggtgcactgaaaggttatcagattaccaacaaatttgaaagctttaaaagcatgagcacccagaacggctttatcttctatattccggcatggctgaccagcaaaattgatccgagcaccggttttgtgaacctgctgaaaacaaaatatacctccattgccgacagcaagaagtttattagcagctttgatcgcattatgtatgttccggaagaggacctgtttgaattcgcactggattacaaaaatttcagccgtaccgatgccgactacatcaaaaaatggaaactgtacagctatggtaaccgcattcgcatttttcgcaacccgaagaaaaacaatgtgttcgattgggaagaagtttgtctgaccagcgcatataaagaacttttcaacaaatacggcatcaactatcagcagggtgatattcgtgcactgctgtgtgaacagagcgataaagcgttttatagcagttttatggcactgatgagcctgatgctgcagatgcgtaatagcattaccggtcgcaccgatgtggattttctgattagtccggtgaaaaattccgatggcatcttttatgatagccgcaattacgaagcacaagaaaatgcaattctgccgaaaaacgcagatgcaaatggtgcatataacattgcacgtaaagttctgtgggcaattggccagtttaagaaagcagaagatgagaagctggacaaagtgaaaattgcgatcagcaataaagagtggctggaatacgcacagaccagcgttaaacatgcgccagcgcctgctcctgcacccgctccagctcctgccccagcgatggtgagcaaaggtgaagaggataatatggccatcatcaaagaattcatgcgcttcaaagttcatatggaaggtagcgttaatggccacgaatttgaaattgaaggtgaaggcgaaggtcgtccgtatgaaggcacccagaccgcaaaactgaaagttaccaaaggtggtccgctgccgtttgcatgggatattctgagtccgcagtttatgtatggtagcaaagcctatgttaaacatccggcagatatcccggattatctgaaactgagctttccggaaggttttaaatgggaacgtgtgatgaattttgaagatggtggtgttgttaccgttacacaggatagcagcctgcaggatggtgaatttatctataaagttaaactgcgtggcacgaattttccgagtgatggtccggttatgcagaaaaaaaccatgggttgggaagcaagcagcgaacgtatgtatccggaagatggcgcactgaaaggtgaaattaaacagcgtctgaagctgaaagatggcggtcattatgatgcagaagttaaaaccacctacaaagccaaaaaaccggttcagctgcctggtgcatataacgttaacattaaactggatatcaccagccacaacgaggattataccattgttgaacagtatgaacgtgcagaaggtcgccatagtaccggtggtatggatgaactgtataaa

SEQ ID NO: 423 - DNA, 4443 bp, synthetic construct
  misc_feature 1..4443: note = SYNTHETIC
  source 1..4443: mol_type = other DNA
atgagcaaactggaaaagttcaccaactgttatagcctgagcaaaaccctgcgttttaaagcaattccggttggtaaaacccaagagaacattgataataaacgcctgctggtcgaagatgaaaaacgcgctgaagattataaaggcgtgaaaaaactgctggatcgctattatctgagcttcattaacgatgtgctgcacagcattaaactgaagaacctgaacaactatatcagcctgtttcgtaaaaaaacccgcaccgaaaaagaaaacaaagagctggaaaacctggaaatcaatctgcgtaaagaaatcgccaaagcgtttaaaggtaacgagggttataaaagcctgttcaagaaagacatcatcgaaaccattctgccggaatttctggatgataaagatgaaattgccctggtgaatagctttaatggctttaccaccgcatttaccggcttttttgataatcgcgaaaacatgttcagcgaagaagcaaaaagcaccagcattgcatttcgctgcattaatgaaaatctgacccgctacattagcaacatggatatctttgaaaaagtggacgcgatcttcgataaacacgaagtgcaagagatcaaagagaaaatcctgaacagcgattatgacgtcgaagatttttttgaaggcgagttctttaacttcgttctgacccaagaaggtatcgacgtttataacgcaattattggtggttttgttaccgaaagcggtgagaaaatcaaaggcctgaatgaatatatcaacctgtataaccagaaaaccaaacagaaactgccgaaattcaaaccgctgtataaacaggttctgagcgatcgtgaaagcctgagcttttatggtgaaggttataccagtgatgaagaggttctggaagtttttcgtaacaccctgaataaaaacagcgagatctttagcagcatcaaaaagcttgagaaactgttcaaaaactttgatgagtatagcagcgcaggcatctttgttaaaaatggtccggcaattagcaccatcagcaaagatatttttggcgaatggaatgtgatccgcgataaatggaatgccgaatatgatgatatccacctgaaaaaaaaggccgtggtgaccgagaaatatgaagatgatcgtcgtaaaagcttcaagaaaattggtagctttagcctggaacagctgcaagaatatgcagatgcagatctgagcgttgtggaaaaactgaaagaaatcatcattcagaaggtggacgagatctataaagtttatggtagcagcgaaaaactgttcgatgcagattttgttctggaaaaaagcctgaaaaagaatgatgccgttgtggccattatgaaagatctgctggatagcgttaagagcttcgagaattacatcaaagccttttttggtgagggcaaagaaaccaatcgtgatgaaagtttctatggcgattttgtgctggcctatgatattctgctgaaagtggaccatatttatgatgccattcgcaattatgttacccagaaaccgtatagcaaagacaagttcaaactgtactttcagaacccgcagtttatgggtggttgggataaagataaagaaaccgattatcgtgccaccatcctgcgttatggtagtaaatactatctggccatcatggacaaaaaatacgcaaaatgcctgcagaaaatcgacaaagatgatgtgaatggcaactatgaaaaaatcaactacaaactgctgcctggtccgaataaaatgctgccgaaagtgttctttagcaagaaatggatggcctattataacccgagcgaggatattcaaaagatctacaaaaatggcacctttaaaaagggcgacatgttcaatctgaacgattgccacaaactgatcgatttcttcaaagattcaatttcgcgttatccgaaatggtccaatgcctatgattttaactttagcgaaaccgaaaaatacaaagacattgccggtttttatcgcgaagtggaagaacagggctataaagtgagctttgaaagcgcaagcaaaaaagaggttgataagctggttgaagagggcaaactgtatatgttccagatttacaacaaagattttagcgacaaaagccatggcaccccgaatctgcataccatgtactttaaactgctgttcgacgaaaataaccatggtcagattcgtctgagcggtggtgccgaactgtttatgcgtcgtgcaagtctgaaaaaagaagaactggttgttcatccggcaaatagcccgattgcaaacaaaaatccggacaatccgaaaaaaaccacgacactgagctatgatgtgtataaagacaaacgttttagcgaggatcagtatctgctgcatatcccgattgccatcaataaatgcccgaaaaacatctttaagatcaacaccgaagttcgcgtgctgctgaaacatgatgataatccgtatgtgattggcattgatcgtggtgaacgtaacctgctgtatattgttgttgttgatggtaaaggcaacatcgtggaacagtatagtctgaacgaaattatcaacaactttaacggcatccgcatcaaaaccgactatcatagcctgctggacaagaaagaaaaagaacgttttgaagcacgtcagaactggaccagtattgaaaacatcaaagaactgaaagccggttatattagccaggtggttcataaaatctgtgagctggtagaaaaatacgatgcagttattgcactggaagatctgaatagcggtttcaaaaatagccgtgtgaaagtcgaaaaacaggtgtatcagaaattcgagaaaatgctgatcgacaaactgaactacatggtcgacaaaaaaagcaatccgtgtgcaaccggtggtgcactgaaaggttatcagattaccaacaaatttgaaagctttaaaagcatgagcacccagaacggctttatcttctatattccggcatggctgaccagcaaaattgatccgagcaccggttttgtgaacctgctgaaaacaaaatatacctccattgccgacagcaagaagtttattagcagctttgatcgcattatgtatgttccggaagaggacctgtttgaattcgcactggattacaaaaatttcagccgtaccgatgccgactacatcaaaaaatggaaactgtacagctatggtaaccgcattcgcatttttcgcaacccgaagaaaaacaatgtgttcgattgggaagaagtttgtctgaccagcgcatataaagaacttttcaacaaatacggcatcaactatcagcagggtgatattcgtgcactgctgtgtgaacagagcgataaagcgttttatagcagttttatggcactgatgagcctgatgctgcagatgcgtaatagcattaccggtcgcaccgatgtggattttctgattagtccggtgaaaaattccgatggcatcttttatgatagccgcaattacgaagcacaagaaaatgcaattctgccgaaaaacgcagatgcaaatggtgcatataacattgcacgtaaagttctgtgggcaattggccagtttaagaaagcagaagatgagaagctggacaaagtgaaaattgcgatcagcaataaagagtggctggaatacgcacagaccagcgttaaacatgcgccagcgcctgctcctgcacccgctccagcgccagctcctgcacctgcgatggtgagcaaaggtgaagaggataatatggccatcatcaaagaattcatgcgcttcaaagttcatatggaaggtagcgttaatggccacgaatttgaaattgaaggtgaaggcgaaggtcgtccgtatgaaggcacccagaccgcaaaactgaaagttaccaaaggtggtccgctgccgtttgcatgggatattctgagtccgcagtttatgtatggtagcaaagcctatgttaaacatccggcagatatcccggattatctgaaactgagctttccggaaggttttaaatgggaacgtgtgatgaattttgaagatggtggtgttgttaccgttacacaggatagcagcctgcaggatggtgaatttatctataaagttaaactgcgtggcacgaattttccgagtgatggtccggttatgcagaaaaaaaccatgggttgggaagcaagcagcgaacgtatgtatccggaagatggcgcactgaaaggtgaaattaaacagcgtctgaagctgaaagatggcggtcattatgatgcagaagttaaaaccacctacaaagccaaaaaaccggttcagctgcctggtgcatataacgttaacattaaactggatatcaccagccacaacgaggattataccattgttgaacagtatgaacgtgcagaaggtcgccatagtaccggtggtatggatgaactgtataaa

SEQ ID NO: 424 - DNA, 4449 bp, synthetic construct
  misc_feature 1..4449: note = SYNTHETIC
  source 1..4449: mol_type = other DNA
atgagcaaactggaaaagttcaccaactgttatagcctgagcaaaaccctgcgttttaaagcaattccggttggtaaaacccaagagaacattgataataaacgcctgctggtcgaagatgaaaaacgcgctgaagattataaaggcgtgaaaaaactgctggatcgctattatctgagcttcattaacgatgtgctgcacagcattaaactgaagaacctgaacaactatatcagcctgtttcgtaaaaaaacccgcaccgaaaaagaaaacaaagagctggaaaacctggaaatcaatctgcgtaaagaaatcgccaaagcgtttaaaggtaacgagggttataaaagcctgttcaagaaagacatcatcgaaaccattctgccggaatttctggatgataaagatgaaattgccctggtgaatagctttaatggctttaccaccgcatttaccggcttttttgataatcgcgaaaacatgttcagcgaagaagcaaaaagcaccagcattgcatttcgctgcattaatgaaaatctgacccgctacattagcaacatggatatctttgaaaaagtggacgcgatcttcgataaacacgaagtgcaagagatcaaagagaaaatcctgaacagcgattatgacgtcgaagatttttttgaaggcgagttctttaacttcgttctgacccaagaaggtatcgacgtttataacgcaattattggtggttttgttaccgaaagcggtgagaaaatcaaaggcctgaatgaatatatcaacctgtataaccagaaaaccaaacagaaactgccgaaattcaaaccgctgtataaacaggttctgagcgatcgtgaaagcctgagcttttatggtgaaggttataccagtgatgaagaggttctggaagtttttcgtaacaccctgaataaaaacagcgagatctttagcagcatcaaaaagcttgagaaactgttcaaaaactttgatgagtatagcagcgcaggcatctttgttaaaaatggtccggcaattagcaccatcagcaaagatatttttggcgaatggaatgtgatccgcgataaatggaatgccgaatatgatgatatccacctgaaaaaaaaggccgtggtgaccgagaaatatgaagatgatcgtcgtaaaagcttcaagaaaattggtagctttagcctggaacagctgcaagaatatgcagatgcagatctgagcgttgtggaaaaactgaaagaaatcatcattcagaaggtggacgagatctataaagtttatggtagcagcgaaaaactgttcgatgcagattttgttctggaaaaaagcctgaaaaagaatgatgccgttgtggccattatgaaagatctgctggatagcgttaagagcttcgagaattacatcaaagccttttttggtgagggcaaagaaaccaatcgtgatgaaagtttctatggcgattttgtgctggcctatgatattctgctgaaagtggaccatatttatgatgccattcgcaattatgttacccagaaaccgtatagcaaagacaagttcaaactgtactttcagaacccgcagtttatgggtggttgggataaagataaagaaaccgattatcgtgccaccatcctgcgttatggtagtaaatactatctggccatcatggacaaaaaatacgcaaaatgcctgcagaaaatcgacaaagatgatgtgaatggcaactatgaaaaaatcaactacaaactgctgcctggtccgaataaaatgctgccgaaagtgttctttagcaagaaatggatggcctattataacccgagcgaggatattcaaaagatctacaaaaatggcacctttaaaaagggcgacatgttcaatctgaacgattgccacaaactgatcgatttcttcaaagattcaatttcgcgttatccgaaatggtccaatgcctatgattttaactttagcgaaaccgaaaaatacaaagacattgccggtttttatcgcgaagtggaagaacagggctataaagtgagctttgaaagcgcaagcaaaaaagaggttgataagctggttgaagagggcaaactgtatatgttccagatttacaacaaagattttagcgacaaaagccatggcaccccgaatctgcataccatgtactttaaactgctgttcgacgaaaataaccatggtcagattcgtctgagcggtggtgccgaactgtttatgcgtcgtgcaagtctgaaaaaagaagaactggttgttcatccggcaaatagcccgattgcaaacaaaaatccggacaatccgaaaaaaaccacgacactgagctatgatgtgtataaagacaaacgttttagcgaggatcagtatctgctgcatatcccgattgccatcaataaatgcccgaaaaacatctttaagatcaacaccgaagttcgcgtgctgctgaaacatgatgataatccgtatgtgattggcattgatcgtggtgaacgtaacctgctgtatattgttgttgttgatggtaaaggcaacatcgtggaacagtatagtctgaacgaaattatcaacaactttaacggcatccgcatcaaaaccgactatcatagcctgctggacaagaaagaaaaagaacgttttgaagcacgtcagaactggaccagtattgaaaacatcaaagaactgaaagccggttatattagccaggtggttcataaaatctgtgagctggtagaaaaatacgatgcagttattgcactggaagatctgaatagcggtttcaaaaatagccgtgtgaaagtcgaaaaacaggtgtatcagaaattcgagaaaatgctgatcgacaaactgaactacatggtcgacaaaaaaagcaatccgtgtgcaaccggtggtgcactgaaaggttatcagattaccaacaaatttgaaagctttaaaagcatgagcacccagaacggctttatcttctatattccggcatggctgaccagcaaaattgatccgagcaccggttttgtgaacctgctgaaaacaaaatatacctccattgccgacagcaagaagtttattagcagctttgatcgcattatgtatgttccggaagaggacctgtttgaattcgcactggattacaaaaatttcagccgtaccgatgccgactacatcaaaaaatggaaactgtacagctatggtaaccgcattcgcatttttcgcaacccgaagaaaaacaatgtgttcgattgggaagaagtttgtctgaccagcgcatataaagaacttttcaacaaatacggcatcaactatcagcagggtgatattcgtgcactgctgtgtgaacagagcgataaagcgttttatagcagttttatggcactgatgagcctgatgctgcagatgcgtaatagcattaccggtcgcaccgatgtggattttctgattagtccggtgaaaaattccgatggcatcttttatgatagccgcaattacgaagcacaagaaaatgcaattctgccgaaaaacgcagatgcaaatggtgcatataacattgcacgtaaagttctgtgggcaattggccagtttaagaaagcagaagatgagaagctggacaaagtgaaaattgcgatcagcaataaagagtggctggaatacgcacagaccagcgttaaacatgcgccagcgcctgctcctgcacccgctccagctcctgcgccagctcctgcacctgcgatggtgagcaaaggtgaagaggataatatggccatcatcaaagaattcatgcgcttcaaagttcatatggaaggtagcgttaatggccacgaatttgaaattgaaggtgaaggcgaaggtcgtccgtatgaaggcacccagaccgcaaaactgaaagttaccaaaggtggtccgctgccgtttgcatgggatattctgagtccgcagtttatgtatggtagcaaagcctatgttaaacatccggcagatatcccggattatctgaaactgagctttccggaaggttttaaatgggaacgtgtgatgaattttgaagatggtggtgttgttaccgttacacaggatagcagcctgcaggatggtgaatttatctataaagttaaactgcgtggcacgaattttccgagtgatggtccggttatgcagaaaaaaaccatgggttgggaagcaagcagcgaacgtatgtatccggaagatggcgcactgaaaggtgaaattaaacagcgtctgaagctgaaagatggcggtcattatgatgcagaagttaaaaccacctacaaagccaaaaaaccggttcagctgcctggtgcatataacgttaacattaaactggatatcaccagccacaacgaggattataccattgttgaacagtatgaacgtgcagaaggtcgccatagtaccggtggtatggatgaactgtataaa

SEQ ID NO: 425 - DNA, 4455 bp, synthetic construct
  misc_feature 1..4455: note = SYNTHETIC
  source 1..4455: mol_type = other DNA
atgagcaaactggaaaagttcaccaactgttatagcctgagcaaaaccctgcgttttaaagcaattccggttggtaaaacccaagagaacattgataataaacgcctgctggtcgaagatgaaaaacgcgctgaagattataaaggcgtgaaaaaactgctggatcgctattatctgagcttcattaacgatgtgctgcacagcattaaactgaagaacctgaacaactatatcagcctgtttcgtaaaaaaacccgcaccgaaaaagaaaacaaagagctggaaaacctggaaatcaatctgcgtaaagaaatcgccaaagcgtttaaaggtaacgagggttataaaagcctgttcaagaaagacatcatcgaaaccattctgccggaatttctggatgataaagatgaaattgccctggtgaatagctttaatggctttaccaccgcatttaccggcttttttgataatcgcgaaaacatgttcagcgaagaagcaaaaagcaccagcattgcatttcgctgcattaatgaaaatctgacccgctacattagcaacatggatatctttgaaaaagtggacgcgatcttcgataaacacgaagtgcaagagatcaaagagaaaatcctgaacagcgattatgacgtcgaagatttttttgaaggcgagttctttaacttcgttctgacccaagaaggtatcgacgtttataacgcaattattggtggttttgttaccgaaagcggtgagaaaatcaaaggcctgaatgaatatatcaacctgtataaccagaaaaccaaacagaaactgccgaaattcaaaccgctgtataaacaggttctgagcgatcgtgaaagcctgagcttttatggtgaaggttataccagtgatgaagaggttctggaagtttttcgtaacaccctgaataaaaacagcgagatctttagcagcatcaaaaagcttgagaaactgttcaaaaactttgatgagtatagcagcgcaggcatctttgttaaaaatggtccggcaattagcaccatcagcaaagatatttttggcgaatggaatgtgatccgcgataaatggaatgccgaatatgatgatatccacctgaaaaaaaaggccgtggtgaccgagaaatatgaagatgatcgtcgtaaaagcttcaagaaaattggtagctttagcctggaacagctgcaagaatatgcagatgcagatctgagcgttgtggaaaaactgaaagaaatcatcattcagaaggtggacgagatctataaagtttatggtagcagcgaaaaactgttcgatgcagattttgttctggaaaaaagcctgaaaaagaatgatgccgttgtggccattatgaaagatctgctggatagcgttaagagcttcgagaattacatcaaagccttttttggtgagggcaaagaaaccaatcgtgatgaaagtttctatggcgattttgtgctggcctatgatattctgctgaaagtggaccatatttatgatgccattcgcaattatgttacccagaaaccgtatagcaaagacaagttcaaactgtactttcagaacccgcagtttatgggtggttgggataaagataaagaaaccgattatcgtgccaccatcctgcgttatggtagtaaatactatctggccatcatggacaaaaaatacgcaaaatgcctgcagaaaatcgacaaagatgatgtgaatggcaactatgaaaaaatcaactacaaactgctgcctggtccgaataaaatgctgccgaaagtgttctttagcaagaaatggatggcctattataacccgagcgaggatattcaaaagatctacaaaaatggcacctttaaaaagggcgacatgttcaatctgaacgattgccacaaactgatcgatttcttcaaagattcaatttcgcgttatccgaaatggtccaatgcctatgattttaactttagcgaaaccgaaaaatacaaagacattgccggtttttatcgcgaagtggaagaacagggctataaagtgagctttgaaagcgcaagcaaaaaagaggttgataagctggttgaagagggcaaactgtatatgttccagatttacaacaaagattttagcgacaaaagccatggcaccccgaatctgcataccatgtactttaaactgctgttcgacgaaaataaccatggtcagattcgtctgagcggtggtgccgaactgtttatgcgtcgtgcaagtctgaaaaaagaagaactggttgttcatccggcaaatagcccgattgcaaacaaaaatccggacaatccgaaaaaaaccacgacactgagctatgatgtgtataaagacaaacgttttagcgaggatcagtatctgctgcatatcccgattgccatcaataaatgcccgaaaaacatctttaagatcaacaccgaagttcgcgtgctgctgaaacatgatgataatccgtatgtgattggcattgatcgtggtgaacgtaacctgctgtatattgttgttgttgatggtaaaggcaacatcgtggaacagtatagtctgaacgaaattatcaacaactttaacggcatccgcatcaaaaccgactatcatagcctgctggacaagaaagaaaaagaacgttttgaagcacgtcagaactggaccagtattgaaaacatcaaagaactgaaagccggttatattagccaggtggttcataaaatctgtgagctggtagaaaaatacgatgcagttattgcactggaagatctgaatagcggtttcaaaaatagccgtgtgaaagtcgaaaaacaggtgtatcagaaattcgagaaaatgctgatcgacaaactgaactacatggtcgacaaaaaaagcaatccgtgtgcaaccggtggtgcactgaaaggttatcagattaccaacaaatttgaaagctttaaaagcatgagcacccagaacggctttatcttctatattccggcatggctgaccagcaaaattgatccgagcaccggttttgtgaacctgctgaaaacaaaatatacctccattgccgacagcaagaagtttattagcagctttgatcgcattatgtatgttccggaagaggacctgtttgaattcgcactggattacaaaaatttcagccgtaccgatgccgactacatcaaaaaatggaaactgtacagctatggtaaccgcattcgcatttttcgcaacccgaagaaaaacaatgtgttcgattgggaagaagtttgtctgaccagcgcatataaagaacttttcaacaaatacggcatcaactatcagcagggtgatattcgtgcactgctgtgtgaacagagcgataaagcgttttatagcagttttatggcactgatgagcctgatgctgcagatgcgtaatagcattaccggtcgcaccgatgtggattttctgattagtccggtgaaaaattccgatggcatcttttatgatagccgcaattacgaagcacaagaaaatgcaattctgccgaaaaacgcagatgcaaatggtgcatataacattgcacgtaaagttctgtgggcaattggccagtttaagaaagcagaagatgagaagctggacaaagtgaaaattgcgatcagcaataaagagtggctggaatacgcacagaccagcgttaaacatgcgccagcgcctgctcctgcacccgctccagctcctgctcctgcgccagctcctgcacctgcgatggtgagcaaaggtgaagaggataatatggccatcatcaaagaattcatgcgcttcaaagttcatatggaaggtagcgttaatggccacgaatttgaaattgaaggtgaaggcgaaggtcgtccgtatgaaggcacccagaccgcaaaactgaaagttaccaaaggtggtccgctgccgtttgcatgggatattctgagtccgcagtttatgtatggtagcaaagcctatgttaaacatccggcagatatcccggattatctgaaactgagctttccggaaggttttaaatgggaacgtgtgatgaattttgaagatggtggtgttgttaccgttacacaggatagcagcctgcaggatggtgaatttatctataaagttaaactgcgtggcacgaattttccgagtgatggtccggttatgcagaaaaaaaccatgggttgggaagcaagcagcgaacgtatgtatccggaagatggcgcactgaaaggtgaaattaaacagcgtctgaagctgaaagatggcggtcattatgatgcagaagttaaaaccacctacaaagccaaaaaaccggttcagctgcctggtgcatataacgttaacattaaactggatatcaccagccacaacgaggattataccattgttgaacagtatgaacgtgcagaaggtcgccatagtaccggtggtatggatgaactgtataaa

SEQ ID NO: 426 - DNA, 4461 bp, synthetic construct
  misc_feature 1..4461: note = SYNTHETIC
  source 1..4461: mol_type = other DNA
atgagcaaactggaaaagttcaccaactgttatagcctgagcaaaaccctgcgttttaaagcaattccggttggtaaaacccaagagaacattgataataaacgcctgctggtcgaagatgaaaaacgcgctgaagattataaaggcgtgaaaaaactgctggatcgctattatctgagcttcattaacgatgtgctgcacagcattaaactgaagaacctgaacaactatatcagcctgtttcgtaaaaaaacccgcaccgaaaaagaaaacaaagagctggaaaacctggaaatcaatctgcgtaaagaaatcgccaaagcgtttaaaggtaacgagggttataaaagcctgttcaagaaagacatcatcgaaaccattctgccggaatttctggatgataaagatgaaattgccctggtgaatagctttaatggctttaccaccgcatttaccggcttttttgataatcgcgaaaacatgttcagcgaagaagcaaaaagcaccagcattgcatttcgctgcattaatgaaaatctgacccgctacattagcaacatggatatctttgaaaaagtggacgcgatcttcgataaacacgaagtgcaagagatcaaagagaaaatcctgaacagcgattatgacgtcgaagatttttttgaaggcgagttctttaacttcgttctgacccaagaaggtatcgacgtttataacgcaattattggtggttttgttaccgaaagcggtgagaaaatcaaaggcctgaatgaatatatcaacctgtataaccagaaaaccaaacagaaactgccgaaattcaaaccgctgtataaacaggttctgagcgatcgtgaaagcctgagcttttatggtgaaggttataccagtgatgaagaggttctggaagtttttcgtaacaccctgaataaaaacagcgagatctttagcagcatcaaaaagcttgagaaactgttcaaaaactttgatgagtatagcagcgcaggcatctttgttaaaaatggtccggcaattagcaccatcagcaaagatatttttggcgaatggaatgtgatccgcgataaatggaatgccgaatatgatgatatccacctgaaaaaaaaggccgtggtgaccgagaaatatgaagatgatcgtcgtaaaagcttcaagaaaattggtagctttagcctggaacagctgcaagaatatgcagatgcagatctgagcgttgtggaaaaactgaaagaaatcatcattcagaaggtggacgagatctataaagtttatggtagcagcgaaaaactgttcgatgcagattttgttctggaaaaaagcctgaaaaagaatgatgccgttgtggccattatgaaagatctgctggatagcgttaagagcttcgagaattacatcaaagccttttttggtgagggcaaagaaaccaatcgtgatgaaagtttctatggcgattttgtgctggcctatgatattctgctgaaagtggaccatatttatgatgccattcgcaattatgttacccagaaaccgtatagcaaagacaagttcaaactgtactttcagaacccgcagtttatgggtggttgggataaagataaagaaaccgattatcgtgccaccatcctgcgttatggtagtaaatactatctggccatcatggacaaaaaatacgcaaaatgcctgcagaaaatcgacaaagatgatgtgaatggcaactatgaaaaaatcaactacaaactgctgcctggtccgaataaaatgctgccgaaagtgttctttagcaagaaatggatggcctattataacccgagcgaggatattcaaaagatctacaaaaatggcacctttaaaaagggcgacatgttcaatctgaacgattgccacaaactgatcgatttcttcaaagattcaatttcgcgttatccgaaatggtccaatgcctatgattttaactttagcgaaaccgaaaaatacaaagacattgccggtttttatcgcgaagtggaagaacagggctataaagtgagctttgaaagcgcaagcaaaaaagaggttgataagctggttgaagagggcaaactgtatatgttccagatttacaacaaagattttagcgacaaaagccatggcaccccgaatctgcataccatgtactttaaactgctgttcgacgaaaataaccatggtcagattcgtctgagcggtggtgccgaactgtttatgcgtcgtgcaagtctgaaaaaagaagaactggttgttcatccggcaaatagcccgattgcaaacaaaaatccggacaatccgaaaaaaaccacgacactgagctatgatgtgtataaagacaaacgttttagcgaggatcagtatctgctgcatatcccgattgccatcaataaatgcccgaaaaacatctttaagatcaacaccgaagttcgcgtgctgctgaaacatgatgataatccgtatgtgattggcattgatcgtggtgaacgtaacctgctgtatattgttgttgttgatggtaaaggcaacatcgtggaacagtatagtctgaacgaaattatcaacaactttaacggcatccgcatcaaaaccgactatcatagcctgctggacaagaaagaaaaagaacgttttgaagcacgtcagaactggaccagtattgaaaacatcaaagaactgaaagccggttatattagccaggtggttcataaaatctgtgagctggtagaaaaatacgatgcagttattgcactggaagatctgaatagcggtttcaaaaatagccgtgtgaaagtcgaaaaacaggtgtatcagaaattcgagaaaatgctgatcgacaaactgaactacatggtcgacaaaaaaagcaatccgtgtgcaaccggtggtgcactgaaaggttatcagattaccaacaaatttgaaagctttaaaagcatgagcacccagaacggctttatcttctatattccggcatggctgaccagcaaaattgatccgagcaccggttttgtgaacctgctgaaaacaaaatatacctccattgccgacagcaagaagtttattagcagctttgatcgcattatgtatgttccggaagaggacctgtttgaattcgcactggattacaaaaatttcagccgtaccgatgccgactacatcaaaaaatggaaactgtacagctatggtaaccgcattcgcatttttcgcaacccgaagaaaaacaatgtgttcgattgggaagaagtttgtctgaccagcgcatataaagaacttttcaacaaatacggcatcaactatcagcagggtgatattcgtgcactgctgtgtgaacagagcgataaagcgttttatagcagttttatggcactgatgagcctgatgctgcagatgcgtaatagcattaccggtcgcaccgatgtggattttctgattagtccggtgaaaaattccgatggcatcttttatgatagccgcaattacgaagcacaagaaaatgcaattctgccgaaaaacgcagatgcaaatggtgcatataacattgcacgtaaagttctgtgggcaattggccagtttaagaaagcagaagatgagaagctggacaaagtgaaaattgcgatcagcaataaagagtggctggaatacgcacagaccagcgttaaacatgcgccagcgcctgctcctgcacccgctccagctcctgccccagctccagcgcccgctcctgcacctgcgatggtgagcaaaggtgaagaggataatatggccatcatcaaagaattcatgcgcttcaaagttcatatggaaggtagcgttaatggccacgaatttgaaattgaaggtgaaggcgaaggtcgtccgtatgaaggcacccagaccgcaaaactgaaagttaccaaaggtggtccgctgccgtttgcatgggatattctgagtccgcagtttatgtatggtagcaaagcctatgttaaacatccggcagatatcccggattatctgaaactgagctttccggaaggttttaaatgggaacgtgtgatgaattttgaagatggtggtgttgttaccgttacacaggatagcagcctgcaggatggtgaatttatctataaagttaaactgcgtggcacgaattttccgagtgatggtccggttatgcagaaaaaaaccatgggttgggaagcaagcagcgaacgtatgtatccggaagatggcgcactgaaaggtgaaattaaacagcgtctgaagctgaaagatggcggtcattatgatgcagaagttaaaaccacctacaaagccaaaaaaccggttcagctgcctggtgcatataacgttaacattaaactggatatcaccagccacaacgaggattataccattgttgaacagtatgaacgtgcagaaggtcgccatagtaccggtggtatggatgaactgtataaa

SEQ ID NO: 427 - DNA, 4467 bp, synthetic construct
  misc_feature 1..4467: note = SYNTHETIC
  source 1..4467: mol_type = other DNA
atgagcaaactggaaaagttcaccaactgttatagcctgagcaaaaccctgcgttttaaagcaattccggttggtaaaacccaagagaacattgataataaacgcctgctggtcgaagatgaaaaacgcgctgaagattataaaggcgtgaaaaaactgctggatcgctattatctgagcttcattaacgatgtgctgcacagcattaaactgaagaacctgaacaactatatcagcctgtttcgtaaaaaaacccgcaccgaaaaagaaaacaaagagctggaaaacctggaaatcaatctgcgtaaagaaatcgccaaagcgtttaaaggtaacgagggttataaaagcctgttcaagaaagacatcatcgaaaccattctgccggaatttctggatgataaagatgaaattgccctggtgaatagctttaatggctttaccaccgcatttaccggcttttttgataatcgcgaaaacatgttcagcgaagaagcaaaaagcaccagcattgcatttcgctgcattaatgaaaatctgacccgctacattagcaacatggatatctttgaaaaagtggacgcgatcttcgataaacacgaagtgcaagagatcaaagagaaaatcctgaacagcgattatgacgtcgaagatttttttgaaggcgagttctttaacttcgttctgacccaagaaggtatcgacgtttataacgcaattattggtggttttgttaccgaaagcggtgagaaaatcaaaggcctgaatgaatatatcaacctgtataaccagaaaaccaaacagaaactgccgaaattcaaaccgctgtataaacaggttctgagcgatcgtgaaagcctgagcttttatggtgaaggttataccagtgatgaagaggttctggaagtttttcgtaacaccctgaataaaaacagcgagatctttagcagcatcaaaaagcttgagaaactgttcaaaaactttgatgagtatagcagcgcaggcatctttgttaaaaatggtccggcaattagcaccatcagcaaagatatttttggcgaatggaatgtgatccgcgataaatggaatgccgaatatgatgatatccacctgaaaaaaaaggccgtggtgaccgagaaatatgaagatgatcgtcgtaaaagcttcaagaaaattggtagctttagcctggaacagctgcaagaatatgcagatgcagatctgagcgttgtggaaaaactgaaagaaatcatcattcagaaggtggacgagatctataaagtttatggtagcagcgaaaaactgttcgatgcagattttgttctggaaaaaagcctgaaaaagaatgatgccgttgtggccattatgaaagatctgctggatagcgttaagagcttcgagaattacatcaaagccttttttggtgagggcaaagaaaccaatcgtgatgaaagtttctatggcgattttgtgctggcctatgatattctgctgaaagtggaccatatttatgatgccattcgcaattatgttacccagaaaccgtatagcaaagacaagttcaaactgtactttcagaacccgcagtttatgggtggttgggataaagataaagaaaccgattatcgtgccaccatcctgcgttatggtagtaaatactatctggccatcatggacaaaaaatacgcaaaatgcctgcagaaaatcgacaaagatgatgtgaatggcaactatgaaaaaatcaactacaaactgctgcctggtccgaataaaatgctgccgaaagtgttctttagcaagaaatggatggcctattataacccgagcgaggatattcaaaagatctacaaaaatggcacctttaaaaagggcgacatgttcaatctgaacgattgccacaaactgatcgatttcttcaaagattcaatttcgcgttatccgaaatggtccaatgcctatgattttaactttagcgaaaccgaaaaatacaaagacattgccggtttttatcgcgaagtggaagaacagggctataaagtgagctttgaaagcgcaagcaaaaaagaggttgataagctggttgaagagggcaaactgtatatgttccagatttacaacaaagattttagcgacaaaagccatggcaccccgaatctgcataccatgtactttaaactgctgttcgacgaaaataaccatggtcagattcgtctgagcggtggtgccgaactgtttatgcgtcgtgcaagtctgaaaaaagaagaactggttgttcatccggcaaatagcccgattgcaaacaaaaatccggacaatccgaaaaaaaccacgacactgagctatgatgtgtataaagacaaacgttttagcgaggatcagtatctgctgcatatcccgattgccatcaataaatgcccgaaaaacatctttaagatcaacaccgaagttcgcgtgctgctgaaacatgatgataatccgtatgtgattggcattgatcgtggtgaacgtaacctgctgtatattgttgttgttgatggtaaaggcaacatcgtggaacagtatagtctgaacgaaattatcaacaactttaacggcatccgcatcaaaaccgactatcatagcctgctggacaagaaagaaaaagaacgttttgaagcacgtcagaactggaccagtattgaaaacatcaaagaactgaaagccggttatattagccaggtggttcataaaatctgtgagctggtagaaaaatacgatgcagttattgcactggaagatctgaatagcggtttcaaaaatagccgtgtgaaagtcgaaaaacaggtgtatcagaaattcgagaaaatgctgatcgacaaactgaactacatggtcgacaaaaaaagcaatccgtgtgcaaccggtggtgcactgaaaggttatcagattaccaacaaatttgaaagctttaaaagcatgagcacccagaacggctttatcttctatattccggcatggctgaccagcaaaattgatccgagcaccggttttgtgaacctgctgaaaacaaaatatacctccattgccgacagcaagaagtttattagcagctttgatcgcattatgtatgttccggaagaggacctgtttgaattcgcactggattacaaaaatttcagccgtaccgatgccgactacatcaaaaaatggaaactgtacagctatggtaaccgcattcgcatttttcgcaacccgaagaaaaacaatgtgttcgattgggaagaagtttgtctgaccagcgcatataaagaacttttcaacaaatacggcatcaactatcagcagggtgatattcgtgcactgctgtgtgaacagagcgataaagcgttttatagcagttttatggcactgatgagcctgatgctgcagatgcgtaatagcattaccggtcgcaccgatgtggattttctgattagtccggtgaaaaattccgatggcatcttttatgatagccgcaattacgaagcacaagaaaatgcaattctgccgaaaaacgcagatgcaaatggtgcatataacattgcacgtaaagttctgtgggcaattggccagtttaagaaagcagaagatgagaagctggacaaagtgaaaattgcgatcagcaataaagagtggctggaatacgcacagaccagcgttaaacatgcgccagcgcctgctcctgcacccgctccagctcctgccccagctccagcgcccgctcctgctcctgcacctgcgatggtgagcaaaggtgaagaggataatatggccatcatcaaagaattcatgcgcttcaaagttcatatggaaggtagcgttaatggccacgaatttgaaattgaaggtgaaggcgaaggtcgtccgtatgaaggcacccagaccgcaaaactgaaagttaccaaaggtggtccgctgccgtttgcatgggatattctgagtccgcagtttatgtatggtagcaaagcctatgttaaacatccggcagatatcccggattatctgaaactgagctttccggaaggttttaaatgggaacgtgtgatgaattttgaagatggtggtgttgttaccgttacacaggatagcagcctgcaggatggtgaatttatctataaagttaaactgcgtggcacgaattttccgagtgatggtccggttatgcagaaaaaaaccatgggttgggaagcaagcagcgaacgtatgtatccggaagatggcgcactgaaaggtgaaattaaacagcgtctgaagctgaaagatggcggtcattatgatgcagaagttaaaaccacctacaaagccaaaaaaccggttcagctgcctggtgcatataacgttaacattaaactggatatcaccagccacaacgaggattataccattgttgaacagtatgaacgtgcagaaggtcgccatagtaccggtggtatggatgaactgtataaa

SEQ ID NO: 428 - DNA, 4473 bp, synthetic construct
  misc_feature 1..4473: note = SYNTHETIC
  source 1..4473: mol_type = other DNA
atgagcaaactggaaaagttcaccaactgttatagcctgagcaaaaccctgcgttttaaagcaattccggttggtaaaacccaagagaacattgataataaacgcctgctggtcgaagatgaaaaacgcgctgaagattataaaggcgtgaaaaaactgctggatcgctattatctgagcttcattaacgatgtgctgcacagcattaaactgaagaacctgaacaactatatcagcctgtttcgtaaaaaaacccgcaccgaaaaagaaaacaaagagctggaaaacctggaaatcaatctgcgtaaagaaatcgccaaagcgtttaaaggtaacgagggttataaaagcctgttcaagaaagacatcatcgaaaccattctgccggaatttctggatgataaagatgaaattgccctggtgaatagctttaatggctttaccaccgcatttaccggcttttttgataatcgcgaaaacatgttcagcgaagaagcaaaaagcaccagcattgcatttcgctgcattaatgaaaatctgacccgctacattagcaacatggatatctttgaaaaagtggacgcgatcttcgataaacacgaagtgcaagagatcaaagagaaaatcctgaacagcgattatgacgtcgaagatttttttgaaggcgagttctttaacttcgttctgacccaagaaggtatcgacgtttataacgcaattattggtggttttgttaccgaaagcggtgagaaaatcaaaggcctgaatgaatatatcaacctgtataaccagaaaaccaaacagaaactgccgaaattcaaaccgctgtataaacaggttctgagcgatcgtgaaagcctgagcttttatggtgaaggttataccagtgatgaagaggttctggaagtttttcgtaacaccctgaataaaaacagcgagatctttagcagcatcaaaaagcttgagaaactgttcaaaaactttgatgagtatagcagcgcaggcatctttgttaaaaatggtccggcaattagcaccatcagcaaagatatttttggcgaatggaatgtgatccgcgataaatggaatgccgaatatgatgatatccacctgaaaaaaaaggccgtggtgaccgagaaatatgaagatgatcgtcgtaaaagcttcaagaaaattggtagctttagcctggaacagctgcaagaatatgcagatgcagatctgagcgttgtggaaaaactgaaagaaatcatcattcagaaggtggacgagatctataaagtttatggtagcagcgaaaaactgttcgatgcagattttgttctggaaaaaagcctgaaaaagaatgatgccgttgtggccattatgaaagatctgctggatagcgttaagagcttcgagaattacatcaaagccttttttggtgagggcaaagaaaccaatcgtgatgaaagtttctatggcgattttgtgctggcctatgatattctgctgaaagtggaccatatttatgatgccattcgcaattatgttacccagaaaccgtatagcaaagacaagttcaaactgtactttcagaacccgcagtttatgggtggttgggataaagataaagaaaccgattatcgtgccaccatcctgcgttatggtagtaaatactatctggccatcatggacaaaaaatacgcaaaatgcctgcagaaaatcgacaaagatgatgtgaatggcaactatgaaaaaatcaactacaaactgctgcctggtccgaataaaatgctgccgaaagtgttctttagcaagaaatggatggcctattataacccgagcgaggatattcaaaagatctacaaaaatggcacctttaaaaagggcgacatgttcaatctgaacgattgccacaaactgatcgatttcttcaaagattcaatttcgcgttatccgaaatggtccaatgcctatgattttaactttagcgaaaccgaaaaatacaaagacattgccggtttttatcgcgaagtggaagaacagggctataaagtgagctttgaaagcgcaagcaaaaaagaggttgataagctggttgaagagggcaaactgtatatgttccagatttacaacaaagattttagcgacaaaagccatggcaccccgaatctgcataccatgtactttaaactgctgttcgacgaaaataaccatggtcagattcgtctgagcggtggtgccgaactgtttatgcgtcgtgcaagtctgaaaaaagaagaactggttgttcatccggcaaatagcccgattgcaaacaaaaatccggacaatccgaaaaaaaccacgacactgagctatgatgtgtataaagacaaacgttttagcgaggatcagtatctgctgcatatcccgattgccatcaataaatgcccgaaaaacatctttaagatcaacaccgaagttcgcgtgctgctgaaacatgatgataatccgtatgtgattggcattgatcgtggtgaacgtaacctgctgtatattgttgttgttgatggtaaaggcaacatcgtggaacagtatagtctgaacgaaattatcaacaactttaacggcatccgcatcaaaaccgactatcatagcctgctggacaagaaagaaaaagaacgttttgaagcacgtcagaactggaccagtattgaaaacatcaaagaactgaaagccggttatattagccaggtggttcataaaatctgtgagctggtagaaaaatacgatgcagttattgcactggaagatctgaatagcggtttcaaaaatagccgtgtgaaagtcgaaaaacaggtgtatcagaaattcgagaaaatgctgatcgacaaactgaactacatggtcgacaaaaaaagcaatccgtgtgcaaccggtggtgcactgaaaggttatcagattaccaacaaatttgaaagctttaaaagcatgagcacccagaacggctttatcttctatattccggcatggctgaccagcaaaattgatccgagcaccggttttgtgaacctgctgaaaacaaaatatacctccattgccgacagcaagaagtttattagcagctttgatcgcattatgtatgttccggaagaggacctgtttgaattcgcactggattacaaaaatttcagccgtaccgatgccgactacatcaaaaaatggaaactgtacagctatggtaaccgcattcgcatttttcgcaacccgaagaaaaacaatgtgttcgattgggaagaagtttgtctgaccagcgcatataaagaacttttcaacaaatacggcatcaactatcagcagggtgatattcgtgcactgctgtgtgaacagagcgataaagcgttttatagcagttttatggcactgatgagcctgatgctgcagatgcgtaatagcattaccggtcgcaccgatgtggattttctgattagtccggtgaaaaattccgatggcatcttttatgatagccgcaattacgaagcacaagaaaatgcaattctgccgaaaaacgcagatgcaaatggtgcatataacattgcacgtaaagttctgtgggcaattggccagtttaagaaagcagaagatgagaagctggacaaagtgaaaattgcgatcagcaataaagagtggctggaatacgcacagaccagcgttaaacatgcgccagcgcctgctcctgcacccgctccagctcctgccccagctccagcgcccgctcctgcgccagctcctgcacctgcgatggtgagcaaaggtgaagaggataatatggccatcatcaaagaattcatgcgcttcaaagttcatatggaaggtagcgttaatggccacgaatttgaaattgaaggtgaaggcgaaggtcgtccgtatgaaggcacccagaccgcaaaactgaaagttaccaaaggtggtccgctgccgtttgcatgggatattctgagtccgcagtttatgtatggtagcaaagcctatgttaaacatccggcagatatcccggattatctgaaactgagctttccggaaggttttaaatgggaacgtgtgatgaattttgaagatggtggtgttgttaccgttacacaggatagcagcctgcaggatggtgaatttatctataaagttaaactgcgtggcacgaattttccgagtgatggtccggttatgcagaaaaaaaccatgggttgggaagcaagcagcgaacgtatgtatccggaagatggcgcactgaaaggtgaaattaaacagcgtctgaagctgaaagatggcggtcattatgatgcagaagttaaaaccacctacaaagccaaaaaaccggttcagctgcctggtgcatataacgttaacattaaactggatatcaccagccacaacgaggattataccattgttgaacagtatgaacgtgcagaaggtcgccatagtaccggtggtatggatgaactgtataaa

SEQ ID NO: 429 - DNA, 4479 bp, synthetic construct
  misc_feature 1..4479: note = SYNTHETIC
  source 1..4479: mol_type = other DNA
atgagcaaactggaaaagttcaccaactgttatagcctgagcaaaaccctgcgttttaaagcaattccggttggtaaaacccaagagaacattgataataaacgcctgctggtcgaagatgaaaaacgcgctgaagattataaaggcgtgaaaaaactgctggatcgctattatctgagcttcattaacgatgtgctgcacagcattaaactgaagaacctgaacaactatatcagcctgtttcgtaaaaaaacccgcaccgaaaaagaaaacaaagagctggaaaacctggaaatcaatctgcgtaaagaaatcgccaaagcgtttaaaggtaacgagggttataaaagcctgttcaagaaagacatcatcgaaaccattctgccggaatttctggatgataaagatgaaattgccctggtgaatagctttaatggctttaccaccgcatttaccggcttttttgataatcgcgaaaacatgttcagcgaagaagcaaaaagcaccagcattgcatttcgctgcattaatgaaaatctgacccgctacattagcaacatggatatctttgaaaaagtggacgcgatcttcgataaacacgaagtgcaagagatcaaagagaaaatcctgaacagcgattatgacgtcgaagatttttttgaaggcgagttctttaacttcgttctgacccaagaaggtatcgacgtttataacgcaattattggtggttttgttaccgaaagcggtgagaaaatcaaaggcctgaatgaatatatcaacctgtataaccagaaaaccaaacagaaactgccgaaattcaaaccgctgtataaacaggttctgagcgatcgtgaaagcctgagcttttatggtgaaggttataccagtgatgaagaggttctggaagtttttcgtaacaccctgaataaaaacagcgagatctttagcagcatcaaaaagcttgagaaactgttcaaaaactttgatgagtatagcagcgcaggcatctttgttaaaaatggtccggcaattagcaccatcagcaaagatatttttggcgaatggaatgtgatccgcgataaatggaatgccgaatatgatgatatccacctgaaaaaaaaggccgtggtgaccgagaaatatgaagatgatcgtcgtaaaagcttcaagaaaattggtagctttagcctggaacagctgcaagaatatgcagatgcagatctgagcgttgtggaaaaactgaaagaaatcatcattcagaaggtggacgagatctataaagtttatggtagcagcgaaaaactgttcgatgcagattttgttctggaaaaaagcctgaaaaagaatgatgccgttgtggccattatgaaagatctgctggatagcgttaagagcttcgagaattacatcaaagccttttttggtgagggcaaagaaaccaatcgtgatgaaagtttctatggcgattttgtgctggcctatgatattctgctgaaagtggaccatatttatgatgccattcgcaattatgttacccagaaaccgtatagcaaagacaagttcaaactgtactttcagaacccgcagtttatgggtggttgggataaagataaagaaaccgattatcgtgccaccatcctgcgttatggtagtaaatactatctggccatcatggacaaaaaatacgcaaaatgcctgcagaaaatcgacaaagatgatgtgaatggcaactatgaaaaaatcaactacaaactgctgcctggtccgaataaaatgctgccgaaagtgttctttagcaagaaatggatggcctattataacccgagcgaggatattcaaaagatctacaaaaatggcacctttaaaaagggcgacatgttcaatctgaacgattgccacaaactgatcgatttcttcaaagattcaatttcgcgttatccgaaatggtccaatgcctatgattttaactttagcgaaaccgaaaaatacaaagacattgccggtttttatcgcgaagtggaagaacagggctataaagtgagctttgaaagcgcaagcaaaaaagaggttgataagctggttgaagagggcaaactgtatatgttccagatttacaacaaagattttagcgacaaaagccatggcaccccgaatctgcataccatgtactttaaactgctgttcgacgaaaataaccatggtcagattcgtctgagcggtggtgccgaactgtttatgcgtcgtgcaagtctgaaaaaagaagaactggttgttcatccggcaaatagcccgattgcaaacaaaaatccggacaatccgaaaaaaaccacgacactgagctatgatgtgtataaagacaaacgttttagcgaggatcagtatctgctgcatatcccgattgccatcaataaatgcccgaaaaacatctttaagatcaacaccgaagttcgcgtgctgctgaaacatgatgataatccgtatgtgattggcattgatcgtggtgaacgtaacctgctgtatattgttgttgttgatggtaaaggcaacatcgtggaacagtatagtctgaacgaaattatcaacaactttaacggcatccgcatcaaaaccgactatcatagcctgctggacaagaaagaaaaagaacgttttgaagcacgtcagaactggaccagtattgaaaacatcaaagaactgaaagccggttatattagccaggtggttcataaaatctgtgagctggtagaaaaatacgatgcagttattgcactggaagatctgaatagcggtttcaaaaatagccgtgtgaaagtcgaaaaacaggtgtatcagaaattcgagaaaatgctgatcgacaaactgaactacatggtcgacaaaaaaagcaatccgtgtgcaaccggtggtgcactgaaaggttatcagattaccaacaaatttgaaagctttaaaagcatgagcacccagaacggctttatcttctatattccggcatggctgaccagcaaaattgatccgagcaccggttttgtgaacctgctgaaaacaaaatatacctccattgccgacagcaagaagtttattagcagctttgatcgcattatgtatgttccggaagaggacctgtttgaattcgcactggattacaaaaatttcagccgtaccgatgccgactacatcaaaaaatggaaactgtacagctatggtaaccgcattcgcatttttcgcaacccgaagaaaaacaatgtgttcgattgggaagaagtttgtctgaccagcgcatataaagaacttttcaacaaatacggcatcaactatcagcagggtgatattcgtgcactgctgtgtgaacagagcgataaagcgttttatagcagttttatggcactgatgagcctgatgctgcagatgcgtaatagcattaccggtcgcaccgatgtggattttctgattagtccggtgaaaaattccgatggcatcttttatgatagccgcaattacgaagcacaagaaaatgcaattctgccgaaaaacgcagatgcaaatggtgcatataacattgcacgtaaagttctgtgggcaattggccagtttaagaaagcagaagatgagaagctggacaaagtgaaaattgcgatcagcaataaagagtggctggaatacgcacagaccagcgttaaacatgcgccagcgcctgctcctgcacccgctccagctcctgccccagctccagcgcccgctcctgcgccagctcctgcacctgctccagcgatggtgagcaaaggtgaagaggataatatggccatcatcaaagaattcatgcgcttcaaagttcatatggaaggtagcgttaatggccacgaatttgaaattgaaggtgaaggcgaaggtcgtccgtatgaaggcacccagaccgcaaaactgaaagttaccaaaggtggtccgctgccgtttgcatgggatattctgagtccgcagtttatgtatggtagcaaagcctatgttaaacatccggcagatatcccggattatctgaaactgagctttccggaaggttttaaatgggaacgtgtgatgaattttgaagatggtggtgttgttaccgttacacaggatagcagcctgcaggatggtgaatttatctataaagttaaactgcgtggcacgaattttccgagtgatggtccggttatgcagaaaaaaaccatgggttgggaagcaagcagcgaacgtatgtatccggaagatggcgcactgaaaggtgaaattaaacagcgtctgaagctgaaagatggcggtcattatgatgcagaagttaaaaccacctacaaagccaaaaaaccggttcagctgcctggtgcatataacgttaacattaaactggatatcaccagccacaacgaggattataccattgttgaacagtatgaacgtgcagaaggtcgccatagtaccggtggtatggatgaactgtataaa

SEQ ID NO: 430 - protein, 14 aa, synthetic construct
GGGGSEAAAKGGGG

SEQ ID NO: 431 - protein, 21 aa, synthetic construct
GGGGSGGGGSGGGGSGGGGSA

SEQ ID NO: 432 - protein, 5 aa, synthetic construct
EAAAK

SEQ ID NO: 433 - protein, 5 aa, synthetic construct
  VARIANT 1..5: note = The entire sequence of amino acids 1-5 can be repeated up to thirteen times.
EAAAK

SEQ ID NO: 434 - protein, 8 aa, synthetic construct
  VARIANT 1..2: note = XP residues can be repeated up to ten times.
  VARIANT 1: note = X can be any amino acid
  VARIANT 3: note = X can be any amino acid
  VARIANT 5: note = X can be any amino acid
  VARIANT 7: note = X can be any amino acid
XPXPXPXP

SEQ ID NO: 435 - protein, 7 aa, synthetic construct
  VARIANT 1..2: note = XP residues can be repeated up to eleven times.
  VARIANT 1: note = X can be any amino acid
  VARIANT 3: note = X can be any amino acid
  VARIANT 5: note = X can be any amino acid
XPXPXPA

SEQ ID NO: 436 - protein, 7 aa, synthetic construct
  VARIANT 1..2: note = PX residues can be repeated up to eleven times.
  VARIANT 2: note = X can be any amino acid
  VARIANT 4: note = X can be any amino acid
  VARIANT 6: note = X can be any amino acid
PXPXPXP

SEQ ID NO: 437 - protein, 5 aa, synthetic construct
  VARIANT 1..2: note = PA residues can be repeated up to twelve times.
PAPAP

SEQ ID NO: 438 - protein, 13 aa, synthetic construct
PAPAPAPAPAPAP

SEQ ID NO: 439 - protein, 7 aa, synthetic construct
  VARIANT 2..6: note = EAAAK residues can be repeated one or more times.
AEAAAKA

SEQ ID NO: 440 - protein, 8 aa, synthetic construct
  VARIANT 1..2: note = XP residues can be repeated one or more times.
  VARIANT 1: note = X can be any amino acid
  VARIANT 3: note = X can be any amino acid
  VARIANT 5: note = X can be any amino acid
  VARIANT 7: note = X can be any amino acid
XPXPXPXP

SEQ ID NO: 441 - protein, 5 aa, synthetic construct
  VARIANT 1..2: note = AP residues can be repeated one or more times.
APAPA
